United States Patent Application Publication US 2012/0295819 A1 - sequence listing, part 4

SEQ ID NO: 100163 - DNA, 22 bp, Artificial Sequence
  Synthetic
ggaagctgcucacccaagatut

SEQ ID NO: 100164 - DNA, 24 bp, Artificial Sequence
  Synthetic
cagtactgucacctactcaugcac

SEQ ID NO: 100165 - DNA, 25 bp, Artificial Sequence
  Synthetic
gtttgttgctguttgtccaatcuga

SEQ ID NO: 100166 - DNA, 21 bp, Artificial Sequence
  Synthetic
ctgcaaggacucagaggctut

SEQ ID NO: 100167 - DNA, 23 bp, Artificial Sequence
  Synthetic
tccttgtuccgagcagtaaucac

SEQ ID NO: 100168 - DNA, 19 bp, Artificial Sequence
  Synthetic
tgccgguactccagguact

SEQ ID NO: 100169 - DNA, 28 bp, Artificial Sequence
  Synthetic
gataattgtccuggtcatgattgcaaug

SEQ ID NO: 100170 - DNA, 28 bp, Artificial Sequence
  Synthetic
ggtccctcgtaucaaaacattaagagua

SEQ ID NO: 100171 - DNA, 22 bp, Artificial Sequence
  Synthetic
agacucctttcugagacaggca

SEQ ID NO: 100172 - DNA, 27 bp, Artificial Sequence
  Synthetic
tcctgtgaacuctacagaatgtcuaca

SEQ ID NO: 100173 - DNA, 26 bp, Artificial Sequence
  Synthetic
cctagtttccagutatccagcaucag

SEQ ID NO: 100174 - DNA, 22 bp, Artificial Sequence
  Synthetic
caugacaaaggcctgugaagga

SEQ ID NO: 100175 - DNA, 23 bp, Artificial Sequence
  Synthetic
caaatccaacutgactggtgugg

SEQ ID NO: 100176 - DNA, 22 bp, Artificial Sequence
  Synthetic
ccaaccaaaucagccacctuct

SEQ ID NO: 100177 - DNA, 25 bp, Artificial Sequence
  Synthetic
ctttcccacuaccatcaactucact

SEQ ID NO: 100178 - DNA, 20 bp, Artificial Sequence
  Synthetic
ggccugggaggacgattuat

SEQ ID NO: 100179 - DNA, 28 bp, Artificial Sequence
  Synthetic
gctcctttaatgacuggttcctcattut

SEQ ID NO: 100180 - DNA, 22 bp, Artificial Sequence
  Synthetic
actgguaacagcttttguggga

SEQ ID NO: 100181 - DNA, 28 bp, Artificial Sequence
  Synthetic
attgtgatagaaaugtcactgagtgugt

SEQ ID NO: 100182 - DNA, 24 bp, Artificial Sequence
  Synthetic
ttcccaacugtccattttuggaaa

SEQ ID NO: 100183 - DNA, 19 bp, Artificial Sequence
  Synthetic
caagctgcucaggcugaac

SEQ ID NO: 100184 - DNA, 22 bp, Artificial Sequence
  Synthetic
cagauttcctccucaggagcat

SEQ ID NO: 100185 - DNA, 23 bp, Artificial Sequence
  Synthetic
cctatgtcctugtcacctgccua

SEQ ID NO: 100186 - DNA, 23 bp, Artificial Sequence
  Synthetic
tgtactggccauctagtgtucca

SEQ ID NO: 100187 - DNA, 24 bp, Artificial Sequence
  Synthetic
tcatcatugcgacctucaggaaaa

SEQ ID NO: 100188 - DNA, 19 bp, Artificial Sequence
  Synthetic
ctcactgggutgcctcugt

SEQ ID NO: 100189 - DNA, 20 bp, Artificial Sequence
  Synthetic
cctcctccuctcctctgguc

SEQ ID NO: 100190 - DNA, 21 bp, Artificial Sequence
  Synthetic
ggatctgtugacccagcagug

SEQ ID NO: 100191 - DNA, 23 bp, Artificial Sequence
  Synthetic
atgtctctugagcagaggaguct

SEQ ID NO: 100192 - DNA, 23 bp, Artificial Sequence
  Synthetic
caaugtcacacaaugccacacat

SEQ ID NO: 100193 - DNA, 21 bp, Artificial Sequence
  Synthetic
cutcactgtctaugccaccca

SEQ ID NO: 100194 - DNA, 21 bp, Artificial Sequence
  Synthetic
tcacctgguagcccagaugat

SEQ ID NO: 100195 - DNA, 20 bp, Artificial Sequence
  Synthetic
ggtggagcugtacugcaaca

SEQ ID NO: 100196 - DNA, 27 bp, Artificial Sequence
  Synthetic
cccatcugaaccatcaaaaatguagag

SEQ ID NO: 100197 - DNA, 20 bp, Artificial Sequence
  Synthetic
ctgttacgcgguctctcugg

SEQ ID NO: 100198 - DNA, 28 bp, Artificial Sequence
  Synthetic
agtgagttgtagutaagggtaggaucag

SEQ ID NO: 100199 - DNA, 21 bp, Artificial Sequence
  Synthetic
ccctctcucatcagcugggat

SEQ ID NO: 100200 - DNA, 20 bp, Artificial Sequence
  Synthetic
ttggcaagagutcggctuct

SEQ ID NO: 100201 - DNA, 29 bp, Artificial Sequence
  Synthetic
tggctttctctcauttgttatgtgtttug

SEQ ID NO: 100202 - DNA, 22 bp, Artificial Sequence
  Synthetic
gtctggaaguctgcgttgaaug

SEQ ID NO: 100203 - DNA, 22 bp, Artificial Sequence
  Synthetic
cttgtggaggccucatgactut

SEQ ID NO: 100204 - DNA, 20 bp, Artificial Sequence
  Synthetic
ccatacaagguggctgggua

SEQ ID NO: 100205 - DNA, 27 bp, Artificial Sequence
  Synthetic
ctgtcucaagagaagaccaatgtucat

SEQ ID NO: 100206 - DNA, 22 bp, Artificial Sequence
  Synthetic
cugtaaaagtcuaccccaggct

SEQ ID NO: 100207 - DNA, 20 bp, Artificial Sequence
  Synthetic
gcaucagccgcaaagagcua

SEQ ID NO: 100208 - DNA, 27 bp, Artificial Sequence
  Synthetic
ccttctggtattuctgccaccattuat

SEQ ID NO: 100209 - DNA, 20 bp, Artificial Sequence
  Synthetic
cttcccgaaugtgtgtugcc

SEQ ID NO: 100210 - DNA, 27 bp, Artificial Sequence
  Synthetic
tctaattgaacugcagacatggtugaa

SEQ ID NO: 100211 - DNA, 33 bp, Artificial Sequence
  Synthetic
gttttgagttagucaatcttagaaatgaauacc

SEQ ID NO: 100212 - DNA, 22 bp, Artificial Sequence
  Synthetic
catactccatcugcagggctuc

SEQ ID NO: 100213 - DNA, 22 bp, Artificial Sequence
  Synthetic
gaactgacgtuggcaggaagua

SEQ ID NO: 100214 - DNA, 27 bp, Artificial Sequence
  Synthetic
acaatggucagaaagacaatgccttua

SEQ ID NO: 100215 - DNA, 24 bp, Artificial Sequence
  Synthetic
tgaagtgtgcuaatggagauccac

SEQ ID NO: 100216 - DNA, 18 bp, Artificial Sequence
  Synthetic
cgacuccccctctcguct

SEQ ID NO: 100217 - DNA, 17 bp, Artificial Sequence
  Synthetic
gtgagcgcgucgttgug

SEQ ID NO: 100218 - DNA, 22 bp, Artificial Sequence
  Synthetic
cttgtcgggcutggtgaaaaug

SEQ ID NO: 100219 - DNA, 21 bp, Artificial Sequence
  Synthetic
cgtgctcuagggacacctaug

SEQ ID NO: 100220 - DNA, 24 bp, Artificial Sequence
  Synthetic
ctcctttcacuctgtgtccucaaa

SEQ ID NO: 100221 - DNA, 25 bp, Artificial Sequence
  Synthetic
tcaagcatgaautcagtccugacaa

SEQ ID NO: 100222 - DNA, 25 bp, Artificial Sequence
  Synthetic
acgaatgtuagagactgcuccaaag

SEQ ID NO: 100223 - DNA, 22 bp, Artificial Sequence
  Synthetic
tggaggccaugctttaugcaat

SEQ ID NO: 100224 - DNA, 24 bp, Artificial Sequence
  Synthetic
tcagggtccutgttaatctgguca

SEQ ID NO: 100225 - DNA, 22 bp, Artificial Sequence
  Synthetic
ccaggagtaugcccattccaua

SEQ ID NO: 100226 - DNA, 20 bp, Artificial Sequence
  Synthetic
tcgagguggagacccatgut

SEQ ID NO: 100227 - DNA, 25 bp, Artificial Sequence
  Synthetic
agacctgugtgtctgatuagagagg

SEQ ID NO: 100228 - DNA, 18 bp, Artificial Sequence
  Synthetic
guggaaccagagcccuca

SEQ ID NO: 100229 - DNA, 19 bp, Artificial Sequence
  Synthetic
gggaagtgcucctggacut

SEQ ID NO: 100230 - DNA, 20 bp, Artificial Sequence
  Synthetic
cagccgaacuccgacacaua

SEQ ID NO: 100231 - DNA, 24 bp, Artificial Sequence
  Synthetic
cctcccucttcttttucccaacag

SEQ ID NO: 100232 - DNA, 25 bp, Artificial Sequence
  Synthetic
gaactaccaaucatcaauccaggct

SEQ ID NO: 100233 - DNA, 22 bp, Artificial Sequence
  Synthetic
tgactagtugaagggcctugac

SEQ ID NO: 100234 - DNA, 20 bp, Artificial Sequence
  Synthetic
gagaaggaccuggtguggaa

SEQ ID NO: 100235 - DNA, 19 bp, Artificial Sequence
  Synthetic
gtagccagaggcugtgguc

SEQ ID NO: 100236 - DNA, 21 bp, Artificial Sequence
  Synthetic
ccttcugcaaaggcucagact

SEQ ID NO: 100237 - DNA, 22 bp, Artificial Sequence
  Synthetic
gaggccucctacaucaggaaac

SEQ ID NO: 100238 - DNA, 21 bp, Artificial Sequence
  Synthetic
caaagaaccucacagggccut

SEQ ID NO: 100239 - DNA, 28 bp, Artificial Sequence
  Synthetic
cagttattggccautacactcugaaaat

SEQ ID NO: 100240 - DNA, 23 bp, Artificial Sequence
  Synthetic
ccccaaaauaatgtccccaucca

SEQ ID NO: 100241 - DNA, 23 bp, Artificial Sequence
  Synthetic
ggattgcaauaccacctguggag

SEQ ID NO: 100242 - DNA, 23 bp, Artificial Sequence
  Synthetic
cccctacucacgttgatgaucac

SEQ ID NO: 100243 - DNA, 20 bp, Artificial Sequence
  Synthetic
gcctcgugaatgacccaucc

SEQ ID NO: 100244 - DNA, 24 bp, Artificial Sequence
  Synthetic
ggucaggaaaagaagcucaaacag

SEQ ID NO: 100245 - DNA, 21 bp, Artificial Sequence
  Synthetic
cgtggtuggaatgcttcauca

SEQ ID NO: 100246 - DNA, 28 bp, Artificial Sequence
  Synthetic
tctgttccattugtgacattgtaugact

SEQ ID NO: 100247 - DNA, 27 bp, Artificial Sequence
  Synthetic
tttctagctcaguggtaagcttaggua

SEQ ID NO: 100248 - DNA, 19 bp, Artificial Sequence
  Synthetic
ttcccagcggguaagucac

SEQ ID NO: 100249 - DNA, 22 bp, Artificial Sequence
  Synthetic
aatgtcuggagcgcttctgaut

SEQ ID NO: 100250 - DNA, 28 bp, Artificial Sequence
  Synthetic
agaggcaataattuccaaagcagatcut

SEQ ID NO: 100251 - DNA, 22 bp, Artificial Sequence
  Synthetic
cttaacgcgauctgctctgtug

SEQ ID NO: 100252 - DNA, 25 bp, Artificial Sequence
  Synthetic
agctgaggtaacucattttgccaut

SEQ ID NO: 100253 - DNA, 21 bp, Artificial Sequence
  Synthetic
accacaacgcuctgattcucc

SEQ ID NO: 100254 - DNA, 23 bp, Artificial Sequence
  Synthetic
catcttcagtguctgggatcgug

SEQ ID NO: 100255 - DNA, 26 bp, Artificial Sequence
  Synthetic
atttcttaggtaugcctggactgtug

SEQ ID NO: 100256 - DNA, 23 bp, Artificial Sequence
  Synthetic
gagagagtuggagtcaatgguga

SEQ ID NO: 100257 - DNA, 27 bp, Artificial Sequence
  Synthetic
cccctggaatcauataccatacaggut

SEQ ID NO: 100258 - DNA, 22 bp, Artificial Sequence
  Synthetic
gcttgcacagaucttacacugg

SEQ ID NO: 100259 - DNA, 28 bp, Artificial Sequence
  Synthetic
cctctaaagtctgucttcatgataggut

SEQ ID NO: 100260 - DNA, 22 bp, Artificial Sequence
  Synthetic
ggcagtcccaaugttggatgut

SEQ ID NO: 100261 - DNA, 20 bp, Artificial Sequence
  Synthetic
gtgacccccggutatcctug

SEQ ID NO: 100262 - DNA, 23 bp, Artificial Sequence
  Synthetic
aattgaacccutacacccuacgg

SEQ ID NO: 100263 - DNA, 28 bp, Artificial Sequence
  Synthetic
agtagcctcatugtcatcatcctcauat

SEQ ID NO: 100264 - DNA, 22 bp, Artificial Sequence
  Synthetic
ccauggaattcuggaccaagga

SEQ ID NO: 100265 - DNA, 20 bp, Artificial Sequence
  Synthetic
caaggtcugaggaccggaug

SEQ ID NO: 100266 - DNA, 23 bp, Artificial Sequence
  Synthetic
ccaagacgacauagccaggagua

SEQ ID NO: 100267 - DNA, 24 bp, Artificial Sequence
  Synthetic
tcaaggagaucaaaggcuacaagg

SEQ ID NO: 100268 - DNA, 21 bp, Artificial Sequence
  Synthetic
cagccacagugacgaagaugt

SEQ ID NO: 100269 - DNA, 23 bp, Artificial Sequence
  Synthetic
tcacaggcugtttctgacttuca

SEQ ID NO: 100270 - DNA, 27 bp, Artificial Sequence
  Synthetic
tggaattctgtaugtggtcaaatcugt

SEQ ID NO: 100271 - DNA, 25 bp, Artificial Sequence
  Synthetic
acagctgcaaugtactggtaugaat

SEQ ID NO: 100272 - DNA, 20 bp, Artificial Sequence
  Synthetic
tggacaccgcugtgattugt

SEQ ID NO: 100273 - DNA, 24 bp, Artificial Sequence
  Synthetic
cagttcacttuggttttccagcuc

SEQ ID NO: 100274 - DNA, 24 bp, Artificial Sequence
  Synthetic
gtttggtggaugtaccctttccua

SEQ ID NO: 100275 - DNA, 27 bp, Artificial Sequence
  Synthetic
caaagaguaccacaaaaggttgaacut

SEQ ID NO: 100276 - DNA, 21 bp, Artificial Sequence
  Synthetic
gtttaacgaagcccuccguga

SEQ ID NO: 100277 - DNA, 21 bp, Artificial Sequence
  Synthetic
cagccccuttaggaccaaugt

SEQ ID NO: 100278 - DNA, 20 bp, Artificial Sequence
  Synthetic
cgccatuaaccgccagatut

SEQ ID NO: 100279 - DNA, 25 bp, Artificial Sequence
  Synthetic
aagaagggccagutcttgaatguag

SEQ ID NO: 100280 - DNA, 19 bp, Artificial Sequence
  Synthetic
cucaaggaccaccgcauct

SEQ ID NO: 100281 - DNA, 18 bp, Artificial Sequence
  Synthetic
gtcacaguggcctcgcua

SEQ ID NO: 100282 - DNA, 28 bp, Artificial Sequence
  Synthetic
ctcagucagaagaaaauggacaaaaacc

SEQ ID NO: 100283 - DNA, 22 bp, Artificial Sequence
  Synthetic
atgacccctuacacaacgtcuc

SEQ ID NO: 100284 - DNA, 25 bp, Artificial Sequence
  Synthetic
gcactgtgaaacucattcagguaga

SEQ ID NO: 100285 - DNA, 21 bp, Artificial Sequence
  Synthetic
gctcguggacaagattgtgug

SEQ ID NO: 100286 - DNA, 31 bp, Artificial Sequence
  Synthetic
cactgtcactcauttttattttatactgcut

SEQ ID NO: 100287 - DNA, 22 bp, Artificial Sequence
  Synthetic
tgaugcacccaacugaccaaat

SEQ ID NO: 100288 - DNA, 27 bp, Artificial Sequence
  Synthetic
gtcattgcatuttgttttcagtugaca

SEQ ID NO: 100289 - DNA, 28 bp, Artificial Sequence
  Synthetic
tgaccaaactgaagugctatcatacaut

SEQ ID NO: 100290 - DNA, 20 bp, Artificial Sequence
  Synthetic
gctgagugccctctgtcaut

SEQ ID NO: 100291 - DNA, 28 bp, Artificial Sequence
  Synthetic
tccagtactttcaautcatggagcauac

SEQ ID NO: 100292 - DNA, 22 bp, Artificial Sequence
  Synthetic
catggcagcuagtcatttgugg

SEQ ID NO: 100293 - DNA, 28 bp, Artificial Sequence
  Synthetic
ttcacttacttugcaatcttctcctuga

SEQ ID NO: 100294 - DNA, 20 bp, Artificial Sequence
  Synthetic
ctcctuaccagggtcccgua

SEQ ID NO: 100295 - DNA, 25 bp, Artificial Sequence
  Synthetic
gatggatgtguactgcttcctctuc

SEQ ID NO: 100296 - DNA, 20 bp, Artificial Sequence
  Synthetic
gucaccaacagcagauccgt

SEQ ID NO: 100297 - DNA, 24 bp, Artificial Sequence
  Synthetic
ggugggaggagtgttugacaaaaa

SEQ ID NO: 100298 - DNA, 20 bp, Artificial Sequence
  Synthetic
ctgaaguctggugagcccaa

SEQ ID NO: 100299 - DNA, 20 bp, Artificial Sequence
  Synthetic
gcctccucgttgctguacat

SEQ ID NO: 100300 - DNA, 27 bp, Artificial Sequence
  Synthetic
gatactgaatgguaaggtcagatcugg

SEQ ID NO: 100301 - DNA, 25 bp, Artificial Sequence
  Synthetic
ttgcttcaggucatcaggaattuct

SEQ ID NO: 100302 - DNA, 24 bp, Artificial Sequence
  Synthetic
tggaagggauccagttacttguct

SEQ ID NO: 100303 - DNA, 25 bp, Artificial Sequence
  Synthetic
ggcttagcttcutgattgcaacaut

SEQ ID NO: 100304 - DNA, 21 bp, Artificial Sequence
  Synthetic
caagaugaagcccctguggat

SEQ ID NO: 100305 - DNA, 21 bp, Artificial Sequence
  Synthetic
gtcttcuccacccccactcua

SEQ ID NO: 100306 - DNA, 21 bp, Artificial Sequence
  Synthetic
ggagtggacugccgcttuaat

SEQ ID NO: 100307 - DNA, 27 bp, Artificial Sequence
  Synthetic
ccaagggttaatucttcaaactgctuc

SEQ ID NO: 100308 - DNA, 24 bp, Artificial Sequence
  Synthetic
agactgtgguggttacccatauga

SEQ ID NO: 100309 - DNA, 24 bp, Artificial Sequence
  Synthetic
gtgaagctguccatctccuacaaa

SEQ ID NO: 100310 - DNA, 26 bp, Artificial Sequence
  Synthetic
cagcttatgaugccattctugaaaga

SEQ ID NO: 100311 - DNA, 32 bp, Artificial Sequence
  Synthetic
atgttcacttacatutttgtgattaacacaut

SEQ ID NO: 100312 - DNA, 25 bp, Artificial Sequence
  Synthetic
ccgaccattucagaatcagacucat

SEQ ID NO: 100313 - DNA, 32 bp, Artificial Sequence
  Synthetic
aaatcttgattucatctatactuaggaaacca

SEQ ID NO: 100314 - DNA, 26 bp, Artificial Sequence
  Synthetic
tgggttttccutctttagagcauacc

SEQ ID NO: 100315 - DNA, 22 bp, Artificial Sequence
  Synthetic
tttgccauagttaggcucagca

SEQ ID NO: 100316 - DNA, 28 bp, Artificial Sequence
  Synthetic
gcatcaccatgaugaagagtttattgut

SEQ ID NO: 100317 - DNA, 26 bp, Artificial Sequence
  Synthetic
cttgacccttcauggtttcatttguc

SEQ ID NO: 100318 - DNA, 22 bp, Artificial Sequence
  Synthetic
gttgcgctutcctttctgucaa

SEQ ID NO: 100319 - DNA, 25 bp, Artificial Sequence
  Synthetic
acagggttugagcagttcttatucc

SEQ ID NO: 100320 - DNA, 23 bp, Artificial Sequence
  Synthetic
gtccaccaggcutgagtaaagua

SEQ ID NO: 100321 - DNA, 24 bp, Artificial Sequence
  Synthetic
cgtcactaucttttcaccauggca

SEQ ID NO: 100322 - DNA, 26 bp, Artificial Sequence
  Synthetic
caaagccaauctttgaacauccacat

SEQ ID NO: 100323 - DNA, 28 bp, Artificial Sequence
  Synthetic
ccaaaatatcucaagctggcaatuaagt

SEQ ID NO: 100324 - DNA, 21 bp, Artificial Sequence
  Synthetic
cccactcacuactctgcacuc

SEQ ID NO: 100325 - DNA, 21 bp, Artificial Sequence
  Synthetic
actgactugggccttcccuaa

SEQ ID NO: 100326 - DNA, 24 bp, Artificial Sequence
  Synthetic
tcaaaaautccgcugcaagaagac

SEQ ID NO: 100327 - DNA, 22 bp, Artificial Sequence
  Synthetic
gattguacccggacaggatuct

SEQ ID NO: 100328 - DNA, 23 bp, Artificial Sequence
  Synthetic
acgtgtugagcagttttcuccat

SEQ ID NO: 100329 - DNA, 25 bp, Artificial Sequence
  Synthetic
tgctgtccttuaattgcagcaaauc

SEQ ID NO: 100330 - DNA, 20 bp, Artificial Sequence
  Synthetic
cagcacaagggaccucctua

SEQ ID NO: 100331 - DNA, 27 bp, Artificial Sequence
  Synthetic
gtggaaggugacatcaagttcauaact

SEQ ID NO: 100332 - DNA, 22 bp, Artificial Sequence
  Synthetic
gctctaucacccaccacccuat

SEQ ID NO: 100333 - DNA, 20 bp, Artificial Sequence
  Synthetic
tcaaagtgguccgacgacug

SEQ ID NO: 100334 - DNA, 21 bp, Artificial Sequence
  Synthetic
aaacaagcuggctctcauggt

SEQ ID NO: 100335 - DNA, 24 bp, Artificial Sequence
  Synthetic
acggaggtcuacggagacatuaaa

SEQ ID NO: 100336 - DNA, 22 bp, Artificial Sequence
  Synthetic
catactgctccugccacttcuc

SEQ ID NO: 100337 - DNA, 21 bp, Artificial Sequence
  Synthetic
gaacagcccuaacagcctcuc

SEQ ID NO: 100338 - DNA, 22 bp, Artificial Sequence
  Synthetic
gctctgttucaatcagggugac

SEQ ID NO: 100339 - DNA, 21 bp, Artificial Sequence
  Synthetic
gatgagacagcugcucacact

SEQ ID NO: 100340 - DNA, 21 bp, Artificial Sequence
  Synthetic
ctctagagcccugctgactua

SEQ ID NO: 100341 - DNA, 22 bp, Artificial Sequence
  Synthetic
tccccugaaaagctacagcauc

SEQ ID NO: 100342 - DNA, 22 bp, Artificial Sequence
  Synthetic
ctttgctgagugcctggaagua

SEQ ID NO: 100343 - DNA, 22 bp, Artificial Sequence
  Synthetic
tccagccucgattctcuacact

SEQ ID NO: 100344 - DNA, 21 bp, Artificial Sequence
  Synthetic
gcutcaacucagcagcaaagt

SEQ ID NO: 100345 - DNA, 23 bp, Artificial Sequence
  Synthetic
accatctgugtctcctcttucct

SEQ ID NO: 100346 - DNA, 22 bp, Artificial Sequence
  Synthetic
ctcttttccccugcatccucaa

SEQ ID NO: 100347 - DNA, 27 bp, Artificial Sequence
  Synthetic
ctctaaccactcugtccttgcttttua

SEQ ID NO: 100348 - DNA, 23 bp, Artificial Sequence
  Synthetic
gtccataucaggcaagcauccat

SEQ ID NO: 100349 - DNA, 28 bp, Artificial Sequence
  Synthetic
caatgatgaaggcutctcttctagtuct

SEQ ID NO: 100350 - DNA, 21 bp, Artificial Sequence
  Synthetic
actgaatccgutgacgtccug

SEQ ID NO: 100351 - DNA, 20 bp, Artificial Sequence
  Synthetic
ccctugcacatgucccaaag

SEQ ID NO: 100352 - DNA, 27 bp, Artificial Sequence
  Synthetic
ctttcttgtttugagttactgtugcct

SEQ ID NO: 100353 - DNA, 27 bp, Artificial Sequence
  Synthetic
attggcatcucatttttgttgtucaca

SEQ ID NO: 100354 - DNA, 23 bp, Artificial Sequence
  Synthetic
cccccaugattcacgguaaaaac

SEQ ID NO: 100355 - DNA, 23 bp, Artificial Sequence
  Synthetic
ttcaccugggagcagatuaacac

SEQ ID NO: 100356 - DNA, 21 bp, Artificial Sequence
  Synthetic
tccagcautggtttcucccat

SEQ ID NO: 100357 - DNA, 28 bp, Artificial Sequence
  Synthetic
cacgggaatgtauttacccatatctcut

SEQ ID NO: 100358 - DNA, 27 bp, Artificial Sequence
  Synthetic
ttccgtggcagaaautctaaagtuact

SEQ ID NO: 100359 - DNA, 28 bp, Artificial Sequence
  Synthetic
aacaactctatautgctggaacauggaa

SEQ ID NO: 100360 - DNA, 27 bp, Artificial Sequence
  Synthetic
tggtgaatgatucaacaaactggguaa

SEQ ID NO: 100361 - DNA, 22 bp, Artificial Sequence
  Synthetic
ctatcactggcauccccttcug

SEQ ID NO: 100362 - DNA, 25 bp, Artificial Sequence
  Synthetic
ggtcatgaauttgaaaggtgucagg

SEQ ID NO: 100363 - DNA, 27 bp, Artificial Sequence
  Synthetic
tgagtggctaucacttcaaacugaaat

SEQ ID NO: 100364 - DNA, 28 bp, Artificial Sequence
  Synthetic
tgtttgttgaaaaguagttctgggucaa

SEQ ID NO: 100365 - DNA, 28 bp, Artificial Sequence
  Synthetic
cttgaaagcttgugatcagatgcaauaa

SEQ ID NO: 100366 - DNA, 28 bp, Artificial Sequence
  Synthetic
ggttggaguaacagatauaggaggagag

SEQ ID NO: 100367 - DNA, 25 bp, Artificial Sequence
  Synthetic
cacagtgctuttctcctgttaucca

SEQ ID NO: 100368 - DNA, 25 bp, Artificial Sequence
  Synthetic
agagaagaaaaacugcagacuccaa

SEQ ID NO: 100369 - DNA, 22 bp, Artificial Sequence
  Synthetic
cctgcactcuctgtttcctguc

SEQ ID NO: 100370 - DNA, 20 bp, Artificial Sequence
  Synthetic
gaggucagagcggaaacuct

SEQ ID NO: 100371 - DNA, 21 bp, Artificial Sequence
  Synthetic
ccucagacagcaaagccuacc

SEQ ID NO: 100372 - DNA, 20 bp, Artificial Sequence
  Synthetic
cgagagugcatcuccagcat

SEQ ID NO: 100373 - DNA, 22 bp, Artificial Sequence
  Synthetic
ctcactgucttctctgtuggca

SEQ ID NO: 100374 - DNA, 24 bp, Artificial Sequence
  Synthetic
gagaagcacaguaaacacgaguga

SEQ ID NO: 100375 - DNA, 21 bp, Artificial Sequence
  Synthetic
tcagcacttuctggccacaut

SEQ ID NO: 100376 - DNA, 27 bp, Artificial Sequence
  Synthetic
ccatggtaaaaugccatacctgauaga

SEQ ID NO: 100377 - DNA, 23 bp, Artificial Sequence
  Synthetic
cgtctacgugaaggtgaatggug

SEQ ID NO: 100378 - DNA, 21 bp, Artificial Sequence
  Synthetic
cattccacacagggutcccut

SEQ ID NO: 100379 - DNA, 22 bp, Artificial Sequence
  Synthetic
ccaacccugaaggagaaugaca

SEQ ID NO: 100380 - DNA, 26 bp, Artificial Sequence
  Synthetic
gaagtagtaauggaagtcgaugcagt

SEQ ID NO: 100381 - DNA, 22 bp, Artificial Sequence
  Synthetic
tgtctctactucccacctgcut

SEQ ID NO: 100382 - DNA, 28 bp, Artificial Sequence
  Synthetic
agtgaaaatgagaaacuaacagacacut

SEQ ID NO: 100383 - DNA, 27 bp, Artificial Sequence
  Synthetic
tccttcatctgacugcccatcaataua

SEQ ID NO: 100384 - DNA, 20 bp, Artificial Sequence
  Synthetic
ccgcaacaggaguacugact

SEQ ID NO: 100385 - DNA, 28 bp, Artificial Sequence
  Synthetic
ccacagtacuactaaaagaacgtucgac

SEQ ID NO: 100386 - DNA, 25 bp, Artificial Sequence
  Synthetic
cttctacagtucagtcgaacgtuct

SEQ ID NO: 100387 - DNA, 28 bp, Artificial Sequence
  Synthetic
cctttacttcatucagtgttccagaucc

SEQ ID NO: 100388 - DNA, 27 bp, Artificial Sequence
  Synthetic
ttgatggtgacugttttaatgagcuct

SEQ ID NO: 100389 - DNA, 25 bp, Artificial Sequence
  Synthetic
ggtggagaagugggttttcaaauca

SEQ ID NO: 100390 - DNA, 24 bp, Artificial Sequence
  Synthetic
gagactgaatugaggcagtgtuga

SEQ ID NO: 100391 - DNA, 24 bp, Artificial Sequence
  Synthetic
gccatctttggugaaaccatggua

SEQ ID NO: 100392 - DNA, 22 bp, Artificial Sequence
  Synthetic
aggagaatggugctccaactuc

SEQ ID NO: 100393 - DNA, 25 bp, Artificial Sequence
  Synthetic
ttgtatctctgucttcatcgcctuc

SEQ ID NO: 100394 - DNA, 24 bp, Artificial Sequence
  Synthetic
aggtgaaggaccuttgactuacct

SEQ ID NO: 100395 - DNA, 19 bp, Artificial Sequence
  Synthetic
gctccgccucttccactuc

SEQ ID NO: 100396 - DNA, 17 bp, Artificial Sequence
  Synthetic
gggaacgccguggucag

SEQ ID NO: 100397 - DNA, 18 bp, Artificial Sequence
  Synthetic
tgcgggaggutccucagt

SEQ ID NO: 100398 - DNA, 28 bp, Artificial Sequence
  Synthetic
aggctaaaaaccutagaaagacactugt

SEQ ID NO: 100399 - DNA, 25 bp, Artificial Sequence
  Synthetic
cagtgcactacauacttacccacut

SEQ ID NO: 100400 - DNA, 27 bp, Artificial Sequence
  Synthetic
ttattcacaacgutccaaaatccctug

SEQ ID NO: 100401 - DNA, 23 bp, Artificial Sequence
  Synthetic
ccctcccttucttcgtcttctug

SEQ ID NO: 100402 - DNA, 21 bp, Artificial Sequence
  Synthetic
ctacagguggccaactgtcut

SEQ ID NO: 100403 - DNA, 21 bp, Artificial Sequence
  Synthetic
gcttcautgccatugacacca

SEQ ID NO: 100404 - DNA, 20 bp, Artificial Sequence
  Synthetic
attcucggccatgucaagca

SEQ ID NO: 100405 - DNA, 21 bp, Artificial Sequence
  Synthetic
ggatagggcugaatgcuaggg

SEQ ID NO: 100406 - DNA, 21 bp, Artificial Sequence
  Synthetic
actcacuagggactggaucgt

SEQ ID NO: 100407 - DNA, 22 bp, Artificial Sequence
  Synthetic
cactcggatugccaccaaaaut

SEQ ID NO: 100408 - DNA, 28 bp, Artificial Sequence
  Synthetic
tcctttttcctutctagcagagauacct

SEQ ID NO: 100409 - DNA, 22 bp, Artificial Sequence
  Synthetic
ggaaagugttcaagcuccggaa

SEQ ID NO: 100410 - DNA, 21 bp, Artificial Sequence
  Synthetic
acaaagagguggtgggttuca

SEQ ID NO: 100411 - DNA, 27 bp, Artificial Sequence
  Synthetic
cttcctgagugaggcatttatttgtut

SEQ ID NO: 100412 - DNA, 26 bp, Artificial Sequence
  Synthetic
gaatatttgcccuagaatgccagcua

SEQ ID NO: 100413 - DNA, 24 bp, Artificial Sequence
  Synthetic
cccggaaccaugataagaaucgaa

SEQ ID NO: 100414 - DNA, 19 bp, Artificial Sequence
  Synthetic
agaggcagcacguccauac

SEQ ID NO: 100415 - DNA, 23 bp, Artificial Sequence
  Synthetic
gcagggccuatctattcacctut

SEQ ID NO: 100416 - DNA, 22 bp, Artificial Sequence
  Synthetic
gugcauaccaagggcacagaat

SEQ ID NO: 100417 - DNA, 25 bp, Artificial Sequence
  Synthetic
gcgtaacaacaaauccaacatggug

SEQ ID NO: 100418 - DNA, 28 bp, Artificial Sequence
  Synthetic
agttcttcaaatgautcatagggctuca

SEQ ID NO: 100419 - DNA, 21 bp, Artificial Sequence
  Synthetic
gtuccacccgcaguacagaaa

SEQ ID NO: 100420 - DNA, 23 bp, Artificial Sequence
  Synthetic
tggtcaauggaagcctgtgauac

SEQ ID NO: 100421 - DNA, 28 bp, Artificial Sequence
  Synthetic
ctaaggcaagcugaatacaaacaguaaa

SEQ ID NO: 100422 - DNA, 21 bp, Artificial Sequence
  Synthetic
tgggatacucaccagggtcuc

SEQ ID NO: 100423 - DNA, 24 bp, Artificial Sequence
  Synthetic
gctcacctctutgctctgtgttua

SEQ ID NO: 100424 - DNA, 23 bp, Artificial Sequence
  Synthetic
gguaaaccacagatctugagcct

SEQ ID NO: 100425 - DNA, 23 bp, Artificial Sequence
  Synthetic
tccccttgauttctgctctcuct

SEQ ID NO: 100426 - DNA, 26 bp, Artificial Sequence
  Synthetic
aataaaagccucataactgacugcca

SEQ ID NO: 100427 - DNA, 21 bp, Artificial Sequence
  Synthetic
tgcgactcutgctgtcuaacc

SEQ ID NO: 100428 - DNA, 20 bp, Artificial Sequence
  Synthetic
cagctccucgctctccatuc

SEQ ID NO: 100429 - DNA, 21 bp, Artificial Sequence
  Synthetic
ctacaaccucaccgtgcagua

SEQ ID NO: 100430 - DNA, 22 bp, Artificial Sequence
  Synthetic
ctgctggtugaacacatacugg

SEQ ID NO: 100431 - DNA, 24 bp, Artificial Sequence
  Synthetic
cttgtttctugcctgcatgtttug

SEQ ID NO: 100432 - DNA, 20 bp, Artificial Sequence
  Synthetic
ccccacaggcuggtctctua

SEQ ID NO: 100433 - DNA, 22 bp, Artificial Sequence
  Synthetic
acgatccagacucatcccuacc

SEQ ID NO: 100434 - DNA, 21 bp, Artificial Sequence
  Synthetic
gguagctcatcuccacagggt

SEQ ID NO: 100435 - DNA, 25 bp, Artificial Sequence
  Synthetic
gacaaagggcaaagcutctauaggt

SEQ ID NO: 100436 - DNA, 20 bp, Artificial Sequence
  Synthetic
ctgagtgugggcaactcucc

SEQ ID NO: 100437 - DNA, 27 bp, Artificial Sequence
  Synthetic
tcatgtgtgtttcuttctctccttcuc

SEQ ID NO: 100438 - DNA, 17 bp, Artificial Sequence
  Synthetic
ggcggugccaagaccuc

SEQ ID NO: 100439 - DNA, 17 bp, Artificial Sequence
  Synthetic
gcugcccagcacguagt

SEQ ID NO: 100440 - DNA, 21 bp, Artificial Sequence
  Synthetic
caagaaaugcggcaagcucaa

SEQ ID NO: 100441 - DNA, 19 bp, Artificial Sequence
  Synthetic
aacacgcacutgaccguct

SEQ ID NO: 100442 - DNA, 17 bp, Artificial Sequence
  Synthetic
cgggcgacgacuacgug

SEQ ID NO: 100443 - DNA, 19 bp, Artificial Sequence
  Synthetic
cgtccggcucctgttugat

SEQ ID NO: 100444 - DNA, 20 bp, Artificial Sequence
  Synthetic
tgccgaggacuttgcaacut

SEQ ID NO: 100445 - DNA, 20 bp, Artificial Sequence
  Synthetic
ctctccgcutccaagctcuc

SEQ ID NO: 100446 - DNA, 22 bp, Artificial Sequence
  Synthetic
cgugtttctggaugaggacgac

SEQ ID NO: 100447 - DNA, 17 bp, Artificial Sequence
  Synthetic
ggcacttuggcgacgut

SEQ ID NO: 100448 - DNA, 19 bp, Artificial Sequence
  Synthetic
gcagctgcugagacgcuac

SEQ ID NO: 100449 - DNA, 21 bp, Artificial Sequence
  Synthetic
gtgctgctuggtgatgttcut

SEQ ID NO: 100450 - DNA, 18 bp, Artificial Sequence
  Synthetic
ccugcagcggatcauggt

SEQ ID NO: 100451 - DNA, 18 bp, Artificial Sequence
  Synthetic
agtctgggucgctcucgt

SEQ ID NO: 100452 - DNA, 20 bp, Artificial Sequence
  Synthetic
gagggcgaautcatggctug

SEQ ID NO: 100453 - DNA, 22 bp, Artificial Sequence
  Synthetic
ccatgatcutcctgcgtucgat

SEQ ID NO: 100454 - DNA, 19 bp, Artificial Sequence
  Synthetic
gccgccuctactacagcut

SEQ ID NO: 100455 - DNA, 21 bp, Artificial Sequence
  Synthetic
caggtcgaacaucaggtcguc

SEQ ID NO: 100456 - DNA, 21 bp, Artificial Sequence
  Synthetic
cgcgttcauggtatgguccaa

SEQ ID NO: 100457 - DNA, 22 bp, Artificial Sequence
  Synthetic
ggatcttcucgctgtcctucag

SEQ ID NO: 100458 - DNA, 23 bp, Artificial Sequence
  Synthetic
agcutcaagaacaucaccaagca

SEQ ID NO: 100459 - DNA, 24 bp, Artificial Sequence
  Synthetic
agaaatucaagctcaggucgaaca

SEQ ID NO: 100460 - DNA, 19 bp, Artificial Sequence
  Synthetic
gggcaagcgcuggaaaaug

SEQ ID NO: 100461 - DNA, 19 bp, Artificial Sequence
  Synthetic
tcttctcugggctcuggct

SEQ ID NO: 100462 - DNA, 17 bp, Artificial Sequence
  Synthetic
acgccgacgaccugaug

SEQ ID NO: 100463 - DNA, 22 bp, Artificial Sequence
  Synthetic
ccctcgcugaacgaauccaaat

SEQ ID NO: 100464 - DNA, 22 bp, Artificial Sequence
  Synthetic
ccgacuaccccgactacaagua

SEQ ID NO: 100465 - DNA, 21 bp, Artificial Sequence
  Synthetic
gcatttcttgcuggagcccut

SEQ ID NO: 100466 - DNA, 20 bp, Artificial Sequence
  Synthetic
cctgtcgcuggtggauaagg

SEQ ID NO: 100467 - DNA, 21 bp, Artificial Sequence
  Synthetic
gaacaccaggucggagaagut

SEQ ID NO: 100468 - DNA, 21 bp, Artificial Sequence
  Synthetic
acttcgagtuccccgacuact

SEQ ID NO: 100469 - DNA, 22 bp, Artificial Sequence
  Synthetic
caccacuacaacttccucccaa

SEQ ID NO: 100470 - DNA, 28 bp, Artificial Sequence
  Synthetic
gtgtgagttttcauttaccacatctugt

SEQ ID NO: 100471 - DNA, 21 bp, Artificial Sequence
  Synthetic
ggtgaugagcagttgtuccag

SEQ ID NO: 100472 - DNA, 28 bp, Artificial Sequence
  Synthetic
gtttacctatcaguattagcctgctugt

SEQ ID NO: 100473 - DNA, 22 bp, Artificial Sequence
  Synthetic
cctggtcugatgatgtaugcca

SEQ ID NO: 100474 - DNA, 18 bp, Artificial Sequence
  Synthetic
tgtucccgcagccagaut

SEQ ID NO: 100475 - DNA, 24 bp, Artificial Sequence
  Synthetic
gatggagagaugtatccucccaca

SEQ ID NO: 100476 - DNA, 25 bp, Artificial Sequence
  Synthetic
tctctgccugagtatctttgacugt

SEQ ID NO: 100477 - DNA, 29 bp, Artificial Sequence
  Synthetic
caggtatgctucctttgactatuaagact

SEQ ID NO: 100478 - DNA, 22 bp, Artificial Sequence
  Synthetic
ggcaauagcacagcctctcaua

SEQ ID NO: 100479 - DNA, 24 bp, Artificial Sequence
  Synthetic
aactataagcugtggcatcuggac

SEQ ID NO: 100480 - DNA, 20 bp, Artificial Sequence
  Synthetic
ctcgggucagcagagtctug

SEQ ID NO: 100481 - DNA, 25 bp, Artificial Sequence
  Synthetic
cacccagaautctaacactguggag

SEQ ID NO: 100482 - DNA, 24 bp, Artificial Sequence
  Synthetic
ctcggatcucatactcaacaucgg

SEQ ID NO: 100483 - DNA, 21 bp, Artificial Sequence
  Synthetic
ccccaucatccugaaggaagt

SEQ ID NO: 100484 - DNA, 21 bp, Artificial Sequence
  Synthetic
cctgtgguggtgcgatatucc

SEQ ID NO: 100485 - DNA, 28 bp, Artificial Sequence
  Synthetic
tgacagtcctttutgattgcttgtctua

SEQ ID NO: 100486 - DNA, 21 bp, Artificial Sequence
  Synthetic
agcaaugcagcccgtcttaua

SEQ ID NO: 100487 - DNA, 27 bp, Artificial Sequence
  Synthetic
caacttacaatgcugactatggcuaca

SEQ ID NO: 100488 - DNA, 21 bp, Artificial Sequence
  Synthetic
gtgttguccacctgcttcuct

SEQ ID NO: 100489 - DNA, 28 bp, Artificial Sequence
  Synthetic
aggaagctgtugtcattatgatgatugt

SEQ ID NO: 100490 - DNA, 23 bp, Artificial Sequence
  Synthetic
gttagagaaggcutcccagctut

SEQ ID NO: 100491 - DNA, 27 bp, Artificial Sequence
  Synthetic
aggtgccacttuccacattttacaaua

SEQ ID NO: 100492 - DNA, 21 bp, Artificial Sequence
  Synthetic
catggaucaaggctgtgtugg

SEQ ID NO: 100493 - DNA, 26 bp, Artificial Sequence
  Synthetic
ctgcaactguttctgtgaaatugact

SEQ ID NO: 100494 - DNA, 22 bp, Artificial Sequence
  Synthetic
gggaggaucagcagaugagaaa

SEQ ID NO: 100495 - DNA, 19 bp, Artificial Sequence
  Synthetic
cggagcgucagcaaguacc

SEQ ID NO: 100496 - DNA, 21 bp, Artificial Sequence
  Synthetic
ccaucagagcggaucacacag

SEQ ID NO: 100497 - DNA, 25 bp, Artificial Sequence
  Synthetic
ctatgattcctccuctccctctcut

SEQ ID NO: 100498 - DNA, 21 bp, Artificial Sequence
  Synthetic
aagggatcuccctccaggtut

SEQ ID NO: 100499 - DNA, 24 bp, Artificial Sequence
  Synthetic
ttcgattacaacugctcctctgug

SEQ ID NO: 100500 - DNA, 24 bp, Artificial Sequence
  Synthetic
agtgtccatcucattcagcaucac

SEQ ID NO: 100501 - DNA, 23 bp, Artificial Sequence
  Synthetic
aagcctgtgucattcctttguca

SEQ ID NO: 100502 - DNA, 21 bp, Artificial Sequence
  Synthetic
cgagccugggatttgctcaua

SEQ ID NO: 100503 - DNA, 20 bp, Artificial Sequence
  Synthetic
gtgtttgugcacgaugccat

SEQ ID NO: 100504 - DNA, 24 bp, Artificial Sequence
  Synthetic
aguagagagaacggaacucacaca

SEQ ID NO: 100505 - DNA, 25 bp, Artificial Sequence
  Synthetic
ccacaacactaaaugtggacagcua

SEQ ID NO: 100506 - DNA, 20 bp, Artificial Sequence
  Synthetic
agagctccugagcccagtua

SEQ ID NO: 100507 - DNA, 27 bp, Artificial Sequence
  Synthetic
cgcctcucaggaacagtataaattugt

SEQ ID NO: 100508 - DNA, 19 bp, Artificial Sequence
  Synthetic
aatggcggccgugtactua

SEQ ID NO: 100509 - DNA, 27 bp, Artificial Sequence
  Synthetic
cttctgtgaccuctttccttatcucag

SEQ ID NO: 100510 - DNA, 28 bp, Artificial Sequence
  Synthetic
ctcctttaatgtuagcccttgactauga

SEQ ID NO: 100511 - DNA, 25 bp, Artificial Sequence
  Synthetic
cacttcacgcaucagttttucaaga

SEQ ID NO: 100512 - DNA, 20 bp, Artificial Sequence
  Synthetic
tggcccucgcttatgatcug

SEQ ID NO: 100513 - DNA, 28 bp, Artificial Sequence
  Synthetic
cttcctgatucaaatgagattguggaaa

SEQ ID NO: 100514 - DNA, 28 bp, Artificial Sequence
  Synthetic
agggatgaacuttcttctuagaagcaat

SEQ ID NO: 100515 - DNA, 26 bp, Artificial Sequence
  Synthetic
tcttggtagatugacagtcaccauct

SEQ ID NO: 100516 - DNA, 22 bp, Artificial Sequence
  Synthetic
tctgagcagaggcutctcucat

SEQ ID NO: 100517 - DNA, 28 bp, Artificial Sequence
  Synthetic
attctcttgtgtuctttggtttctcuct

SEQ ID NO: 100518 - DNA, 33 bp, Artificial Sequence
  Synthetic
ttgttatttttcttuagggataagagaagaucc

SEQ ID NO: 100519 - DNA, 28 bp, Artificial Sequence
  Synthetic
gcatttgtagcucaccgaactgtatuat

SEQ ID NO: 100520 - DNA, 20 bp, Artificial Sequence
  Synthetic
cccccaauctccccuaagga

SEQ ID NO: 100521 - DNA, 20 bp, Artificial Sequence
  Synthetic
ccatgccauctggcacauca

SEQ ID NO: 100522 - DNA, 20 bp, Artificial Sequence
  Synthetic
gcaugaggtagcuccaccct

SEQ ID NO: 100523 - DNA, 20 bp, Artificial Sequence
  Synthetic
gaggccuggcgtatttucac

SEQ ID NO: 100524 - DNA, 22 bp, Artificial Sequence
  Synthetic
gcccugcaacaattagtuggaa

SEQ ID NO: 100525 - DNA, 28 bp, Artificial Sequence
  Synthetic
ccatcagtcggauacacacatattcauc

SEQ ID NO: 100526 - DNA, 22 bp, Artificial Sequence
  Synthetic
ccugaaaaagaggacguggaca

SEQ ID NO: 100527 - DNA, 18 bp, Artificial Sequence
  Synthetic
cgtgguggtggtctugct

SEQ ID NO: 100528 - DNA, 21 bp, Artificial Sequence
  Synthetic
cttgggcutctccagcucaat

SEQ ID NO: 100529 - DNA, 21 bp, Artificial Sequence
  Synthetic
cctgcataccugtgggctaug

SEQ ID NO: 100530 - DNA, 19 bp, Artificial Sequence
  Synthetic
aagucaagcagcucgagca

SEQ ID NO: 100531 - DNA, 21 bp, Artificial Sequence
  Synthetic
aggagccgaaggaaugaguct

SEQ ID NO: 100532 - DNA, 24 bp, Artificial Sequence
  Synthetic
cctgguagccagaatcatuacagg

SEQ ID NO: 100533 - DNA, 28 bp, Artificial Sequence
  Synthetic
agcttgctaaguaattcagtggctatut

SEQ ID NO: 100534 - DNA, 23 bp, Artificial Sequence
  Synthetic
cattcttctcucccagctuacct

SEQ ID NO: 100535 - DNA, 22 bp, Artificial Sequence
  Synthetic
ggcugugacaaaaggaaaagca

SEQ ID NO: 100536 - DNA, 20 bp, Artificial Sequence
  Synthetic
ctcaccgaugcacccaugat

SEQ ID NO: 100537 - DNA, 24 bp, Artificial Sequence
  Synthetic
cttgtuaacgagcctttctuccac

SEQ ID NO: 100538 - DNA, 19 bp, Artificial Sequence
  Synthetic
gtgctuccctcctguccac

SEQ ID NO: 100539 - DNA, 18 bp, Artificial Sequence
  Synthetic
gcgaguggcgctgauacc

SEQ ID NO: 100540 - DNA, 22 bp, Artificial Sequence
  Synthetic
ccucctttucaagaggcccaaa

SEQ ID NO: 100541 - DNA, 23 bp, Artificial Sequence
  Synthetic
gactctgcugaaagtggtctuca

SEQ ID NO: 100542 - DNA, 23 bp, Artificial Sequence
  Synthetic
cggaagcaccacuauggagaaac

SEQ ID NO: 100543 - DNA, 28 bp, Artificial Sequence
  Synthetic
tcagtgtgcuaaccattgattattcuga

SEQ ID NO: 100544 - DNA, 20 bp, Artificial Sequence
  Synthetic
ttctcccaugccatguggac

SEQ ID NO: 100545 - DNA, 27 bp, Artificial Sequence
  Synthetic
ttatcaacggugaaagcctattgguat

SEQ ID NO: 100546 - DNA, 20 bp, Artificial Sequence
  Synthetic
gcagtggugggacacactua

SEQ ID NO: 100547 - DNA, 24 bp, Artificial Sequence
  Synthetic
tggaggatgaugtatgtaggucgt

SEQ ID NO: 100548 - DNA, 17 bp, Artificial Sequence
  Synthetic
agcuguaccgggagcgt

SEQ ID NO: 100549 - DNA, 22 bp, Artificial Sequence
  Synthetic
acagggaguagggagacacauc

SEQ ID NO: 100550 - DNA, 31 bp, Artificial Sequence
  Synthetic
cagtaaagtaggcauacttatatagtuggca

SEQ ID NO: 100551 - DNA, 28 bp, Artificial Sequence
  Synthetic
cgcaagaaaaucauagcagaaaacaaga

SEQ ID NO: 100552 - DNA, 28 bp, Artificial Sequence
  Synthetic
gggataaaacaguttctcttaagtggug

SEQ ID NO: 100553 - DNA, 28 bp, Artificial Sequence
  Synthetic
atttttctcttcuctgagctaacaugct

SEQ ID NO: 100554 - DNA, 27 bp, Artificial Sequence
  Synthetic
agatatttgtgcauggtgatggtagug

SEQ ID NO: 100555 - DNA, 27 bp, Artificial Sequence
  Synthetic
tgatctttgtguaggtggatgcaatut

SEQ ID NO: 100556 - DNA, 21 bp, Artificial Sequence
  Synthetic
ctcgattcugctcggttcuca

SEQ ID NO: 100557 - DNA, 17 bp, Artificial Sequence
  Synthetic
ccccggaaacggucgua

SEQ ID NO: 100558 - DNA, 21 bp, Artificial Sequence
  Synthetic
ggtccctcutcagtggcauat

SEQ ID NO: 100559 - DNA, 28 bp, Artificial Sequence
  Synthetic
attttgcagaactautatggagctgcua

SEQ ID NO: 100560 - DNA, 28 bp, Artificial Sequence
  Synthetic
ccaagtgggtugtcagaaaatatcauct

SEQ ID NO: 100561 - DNA, 31 bp, Artificial Sequence
  Synthetic
aagaaataatgtttgucgtaatttggctgut

SEQ ID NO: 100562 - DNA, 21 bp, Artificial Sequence
  Synthetic
ggacucggagguaaggaagca

SEQ ID NO: 100563 - DNA, 17 bp, Artificial Sequence
  Synthetic
gucccagcgggcacaua

SEQ ID NO: 100564 - DNA, 22 bp, Artificial Sequence
  Synthetic
ggaatgugcagctgaggucaat

SEQ ID NO: 100565 - DNA, 21 bp, Artificial Sequence
  Synthetic
gagctgaugaagagagugggt

SEQ ID NO: 100566 - DNA, 22 bp, Artificial Sequence
  Synthetic
tgtaggugccctcatacuggaa

SEQ ID NO: 100567 - DNA, 22 bp, Artificial Sequence
  Synthetic
tutatggcaggugaggaaaggg

SEQ ID NO: 100568 - DNA, 20 bp, Artificial Sequence
  Synthetic
tgcaagaggugacccaagug

SEQ ID NO: 100569 - DNA, 21 bp, Artificial Sequence
  Synthetic
cgaccaguccaccagatugag

SEQ ID NO: 100570 - DNA, 21 bp, Artificial Sequence
  Synthetic
gagcugcaggacgacttcuac

SEQ ID NO: 100571 - DNA, 21 bp, Artificial Sequence
  Synthetic
gtacatugaggtctgcuggga

SEQ ID NO: 100572 - DNA, 21 bp, Artificial Sequence
  Synthetic
ggacacgcucatagagtggug

SEQ ID NO: 100573 - DNA, 17 bp, Artificial Sequence
  Synthetic
cccccgaccgucuacga

SEQ ID NO: 100574 - DNA, 23 bp, Artificial Sequence
  Synthetic
ggactcgugaatgttcttgguga

SEQ ID NO: 100575 - DNA, 20 bp, Artificial Sequence
  Synthetic
tttgcccgcaacucctaugt

SEQ ID NO: 100576 - DNA, 23 bp, Artificial Sequence
  Synthetic
agagaaagutttggugagggcaa

SEQ ID NO: 100577 - DNA, 23 bp, Artificial Sequence
  Synthetic
tgtagaaauggccggatugaagt

SEQ ID NO: 100578 - DNA, 20 bp, Artificial Sequence
  Synthetic
ggaggcugcatcatcguact

SEQ ID NO: 100579 - DNA, 21 bp, Artificial Sequence
  Synthetic
gggctgacauctgtctgtgug

SEQ ID NO: 100580 - DNA, 23 bp, Artificial Sequence
  Synthetic
cgcuagcaagaccaaaaggatut

SEQ ID NO: 100581 - DNA, 23 bp, Artificial Sequence
  Synthetic
cagtcacaauatggagctuccgt

SEQ ID NO: 100582 - DNA, 21 bp, Artificial Sequence
  Synthetic
ggtagutcaggctuggcagaa

SEQ ID NO: 100583 - DNA, 22 bp, Artificial Sequence
  Synthetic
tcggatgcugtgttgaagugat

SEQ ID NO: 100584 - DNA, 21 bp, Artificial Sequence
  Synthetic
gcaagaagugggcaacaccua

SEQ ID NO: 100585 - DNA, 27 bp, Artificial Sequence
  Synthetic
gcatgaaaatgutgatgtgtctugcat

SEQ ID NO: 100586 - DNA, 29 bp, Artificial Sequence
  Synthetic
cctggcactuacttgattccataaauaac

SEQ ID NO: 100587 - DNA, 20 bp, Artificial Sequence
  Synthetic
agtcagcggaugcatgugat

SEQ ID NO: 100588 - DNA, 27 bp, Artificial Sequence
  Synthetic
gtctaataaagutcctgtcgtucagca

SEQ ID NO: 100589 - DNA, 20 bp, Artificial Sequence
  Synthetic
cctgaguggcagacgactua

SEQ ID NO: 100590 - DNA, 22 bp, Artificial Sequence
  Synthetic
cucccccaagauagggaagagt

SEQ ID NO: 100591 - DNA, 20 bp, Artificial Sequence
  Synthetic
aacatcgccugcgttaucct

SEQ ID NO: 100592 - DNA, 23 bp, Artificial Sequence
  Synthetic
ttggtcccttuctttgcactgua

SEQ ID NO: 100593 - DNA, 22 bp, Artificial Sequence
  Synthetic
gacccaucgcctttgatgauga

SEQ ID NO: 100594 - DNA, 20 bp, Artificial Sequence
  Synthetic
ccaaagggcucctugaaggt

SEQ ID NO: 100595 - DNA, 21 bp, Artificial Sequence
  Synthetic
ccuccagaacucagacaaggg

SEQ ID NO: 100596 - DNA, 17 bp, Artificial Sequence
  Synthetic
cctcaccucgcctuggt

SEQ ID NO: 100597 - DNA, 17 bp, Artificial Sequence
  Synthetic
cgcuccuccgggagaca

SEQ ID NO: 100598 - DNA, 18 bp, Artificial Sequence
  Synthetic
cgccucactgtgctuggt

SEQ ID NO: 100599 - DNA, 18 bp, Artificial Sequence
  Synthetic
ccgcaggcutaccgugaa

SEQ ID NO: 100600 - DNA, 18 bp, Artificial Sequence
  Synthetic
cccguacctcuccaacgg

SEQ ID NO: 100601 - DNA, 17 bp, Artificial Sequence
  Synthetic
tugggaucggcgcagaa

SEQ ID NO: 100602 - DNA, 27 bp, Artificial Sequence
  Synthetic
accaggutatcatcuaaaaacgacagg

SEQ ID NO: 100603 - DNA, 28 bp, Artificial Sequence
  Synthetic
ctgagacaacguacgacaaaatatugaa

SEQ ID NO: 100604 - DNA, 28 bp, Artificial Sequence
  Synthetic
caccagccttcuatttctggataagtut

SEQ ID NO: 100605 - DNA, 26 bp, Artificial Sequence
  Synthetic
gggttgtgtcutaactgcaatacaut

SEQ ID NO: 100606 - DNA, 27 bp, Artificial Sequence
  Synthetic
caatatttacaauagcgggcaacugat

SEQ ID NO: 100607 - DNA, 21 bp, Artificial Sequence
  Synthetic
tgaacaggauccagagcuggt

SEQ ID NO: 100608 - DNA, 19 bp, Artificial Sequence
  Synthetic
accctccacacugctccut

SEQ ID NO: 100609 - DNA, 17 bp, Artificial Sequence
  Synthetic
tggtgauccgcgugcag

SEQ ID NO: 100610 - DNA, 25 bp, Artificial Sequence
  Synthetic
caagcugtattctguacccacagat

SEQ ID NO: 100611 - DNA, 24 bp, Artificial Sequence
  Synthetic
ctagatgccugaaatgtgcagaug

SEQ ID NO: 100612 - DNA, 25 bp, Artificial Sequence
  Synthetic
attagtuggacagctcttcugacac

SEQ ID NO: 100613 - DNA, 28 bp, Artificial Sequence
  Synthetic
ttactagacacggacuctgaatgaguat

SEQ ID NO: 100614 - DNA, 24 bp, Artificial Sequence
  Synthetic
ccagacccaagucagtgacattua

SEQ ID NO: 100615 - DNA, 24 bp, Artificial Sequence
  Synthetic
ccagataaacaaauggcagtgcut

SEQ ID NO: 100616 - DNA, 19 bp, Artificial Sequence
  Synthetic
gcgaacgacgagcugaucc

SEQ ID NO: 100617 - DNA, 17 bp, Artificial Sequence
  Synthetic
gccgcggugcttcctua

SEQ ID NO: 100618 - DNA, 19 bp, Artificial Sequence
  Synthetic
guaggccacacagccauca

SEQ ID NO: 100619 - DNA, 17 bp, Artificial Sequence
  Synthetic
ccutcgcgcugagcagt

SEQ ID NO: 100620 - DNA, 21 bp, Artificial Sequence
  Synthetic
ggagggaacggutctuacagt

SEQ ID NO: 100621 - DNA, 22 bp, Artificial Sequence
  Synthetic
gaagttaugggatgtcguggct

SEQ ID NO: 100622 - DNA, 33 bp, Artificial Sequence
  Synthetic
agaatattaaaccagutttatttttcagcaugt

SEQ ID NO: 100623 - DNA, 28 bp, Artificial Sequence
  Synthetic
gactccaccatuttcttcctcttcauaa

SEQ ID NO: 100624 - DNA, 18 bp, Artificial Sequence
  Synthetic
ccucgggaggcctctuac

SEQ ID NO: 100625 - DNA, 20 bp, Artificial Sequence
  Synthetic
cccaggcutaacgtgcatuc

SEQ ID NO: 100626 - DNA, 18 bp, Artificial Sequence
  Synthetic
ggtguacacggcctcgut

SEQ ID NO: 100627 - DNA, 17 bp, Artificial Sequence
  Synthetic
gcccttuccgccacgua

SEQ ID NO: 100628 - DNA, 21 bp, Artificial Sequence
  Synthetic
ccgattccgcuctcttcuagg

SEQ ID NO: 100629 - DNA, 27 bp, Artificial Sequence
  Synthetic
tgtctcatgugccattttctctttuct

SEQ ID NO: 100630 - DNA, 21 bp, Artificial Sequence
  Synthetic
ttgtgugacacctgacaugct

SEQ ID NO: 100631 - DNA, 25 bp, Artificial Sequence
  Synthetic
ggccctcauctccttcatauacaac

SEQ ID NO: 100632 - DNA, 25 bp, Artificial Sequence
  Synthetic
tgtggagugaggtaatttucagcat

SEQ ID NO: 100633 - DNA, 24 bp, Artificial Sequence
  Synthetic
tgctgtcttuagagtatccuggct

SEQ ID NO: 100634 - DNA, 28 bp, Artificial Sequence
  Synthetic
ggagtacaacuccatattttctgauggt

SEQ ID NO: 100635 - DNA, 21 bp, Artificial Sequence
  Synthetic
ctggagacacugccttugact

SEQ ID NO: 100636 - DNA, 23 bp, Artificial Sequence
  Synthetic
aagaagccuctgaatgcctucat

SEQ ID NO: 100637 - DNA, 20 bp, Artificial Sequence
  Synthetic
agggagagggcagguctuac

SEQ ID NO: 100638 - DNA, 18 bp, Artificial Sequence
  Synthetic
cctgugaggaccggccua

SEQ ID NO: 100639 - DNA, 19 bp, Artificial Sequence
  Synthetic
ccaggtgcuccgtgtacug

SEQ ID NO: 100640 - DNA, 21 bp, Artificial Sequence
  Synthetic
tctggaatcacucgagccuga

SEQ ID NO: 100641 - DNA, 20 bp, Artificial Sequence
  Synthetic
ggttgtccugtcagcgtgut

SEQ ID NO: 100642 - DNA, 22 bp, Artificial Sequence
  Synthetic
caacguagagcagatgtugcac

SEQ ID NO: 100643 - DNA, 23 bp, Artificial Sequence
  Synthetic
gagctgtcaugcagaaatggtut

SEQ ID NO: 100644 - DNA, 19 bp, Artificial Sequence
  Synthetic
gaccgcugtatccgctuct

SEQ ID NO: 100645 - DNA, 18 bp, Artificial Sequence
  Synthetic
cacatccugaggccuggt

SEQ ID NO: 100646 - DNA, 18 bp, Artificial Sequence
  Synthetic
gcucuagggccgggaaca

SEQ ID NO: 100647 - DNA, 19 bp, Artificial Sequence
  Synthetic
gatgggcugggacccuaac

SEQ ID NO: 100648 - DNA, 27 bp, Artificial Sequence
  Synthetic
gatctgaaauagaaaccaaggcugagt

SEQ ID NO: 100649 - DNA, 24 bp, Artificial Sequence
  Synthetic
gaactacaagacugggauggacag

SEQ ID NO: 100650 - DNA, 31 bp, Artificial Sequence
  Synthetic
ttgagctagagcaguagaaataacaugaaaa

SEQ ID NO: 100651 - DNA, 28 bp, Artificial Sequence
  Synthetic
gtagttctguagccattgctattctugt

SEQ ID NO: 100652 - DNA, 21 bp, Artificial Sequence
  Synthetic
cagggatugcagaggcgtaut

SEQ ID NO: 100653 - DNA, 20 bp, Artificial Sequence
  Synthetic
gggcgcuctgaatcactucc

SEQ ID NO: 100654 - DNA, 24 bp, Artificial Sequence
  Synthetic
ctgctagacucatgtagatuggct

SEQ ID NO: 100655 - DNA, 17 bp, Artificial Sequence
  Synthetic
cgcggtuggtcctgcua

SEQ ID NO: 100656 - DNA, 18 bp, Artificial Sequence
  Synthetic
gtacgcagucgcgguaca

SEQ ID NO: 100657 - DNA, 22 bp, Artificial Sequence
  Synthetic
ctccggaaguggaagcttcaua

SEQ ID NO: 100658 - DNA, 22 bp, Artificial Sequence
  Synthetic
ggtgacucacagtagcuggact

SEQ ID NO: 100659 - DNA, 24 bp, Artificial Sequence
  Synthetic
ttggttgacugctctgtctttuct

SEQ ID NO: 100660 - DNA, 20 bp, Artificial Sequence
  Synthetic
gcugguagagagggcagaac

SEQ ID NO: 100661 - DNA, 19 bp, Artificial Sequence
  Synthetic
ggccutcugcccgaaaaca

SEQ ID NO: 100662 - DNA, 20 bp, Artificial Sequence
  Synthetic
accccauagcccacagguat

SEQ ID NO: 100663 - DNA, 22 bp, Artificial Sequence
  Synthetic
caagacacuctctcccucacag

SEQ ID NO: 100664 - DNA, 20 bp, Artificial Sequence
  Synthetic
ggcauagcccacgaugaagg

SEQ ID NO: 100665 - DNA, 21 bp, Artificial Sequence
  Synthetic
accccaccauctggtaagugt

SEQ ID NO: 100666 - DNA, 22 bp, Artificial Sequence
  Synthetic
gcgagggaacaguctgacauat

SEQ ID NO: 100667 - DNA, 21 bp, Artificial Sequence
  Synthetic
agagaggcugtgggttcctua

SEQ ID NO: 100668 - DNA, 18 bp, Artificial Sequence
  Synthetic
ggccucgaaggcaucacc

SEQ ID NO: 100669 - DNA, 18 bp, Artificial Sequence
  Synthetic
tgtggtccugggccagua

SEQ ID NO: 100670 - DNA, 20 bp, Artificial Sequence
  Synthetic
cgtccagguaccctttggug

SEQ ID NO: 100671 - DNA, 23 bp, Artificial Sequence
  Synthetic
cattctctcccutggctttcuct

SEQ ID NO: 100672 - DNA, 24 bp, Artificial Sequence
  Synthetic
gcatcccuagcacattttguaggt

SEQ ID NO: 100673 - DNA, 26 bp, Artificial Sequence
  Synthetic
gcagaggtatuacaatgccttgauct

SEQ ID NO: 100674 - DNA, 28 bp, Artificial Sequence
  Synthetic
acattcaccaacutatgccaattctcut

SEQ ID NO: 100675 - DNA, 28 bp, Artificial Sequence
  Synthetic
tcctttctgaatautgagctcatcagug

SEQ ID NO: 100676 - DNA, 22 bp, Artificial Sequence
  Synthetic
cctcuaccccaagagtctcuct

SEQ ID NO: 100677 - DNA, 22 bp, Artificial Sequence
  Synthetic
cgactatggcuacaacctggug

SEQ ID NO: 100678 - DNA, 27 bp, Artificial Sequence
  Synthetic
aaatctcauttcagcattucagaagcc

SEQ ID NO: 100679 - DNA, 23 bp, Artificial Sequence
  Synthetic
tgagctuccaaaccctgucaaaa

SEQ ID NO: 100680 - DNA, 22 bp, Artificial Sequence
  Synthetic
gacaccaataugcagccgttut

SEQ ID NO: 100681 - DNA, 27 bp, Artificial Sequence
  Synthetic
catcaggacatugtgacaaatgttucc

SEQ ID NO: 100682 - DNA, 20 bp, Artificial Sequence
  Synthetic
gcctcaccaauagccacgut

SEQ ID NO: 100683 - DNA, 19 bp, Artificial Sequence
  Synthetic
cctcugagcaacccuggac

SEQ ID NO: 100684 - DNA, 20 bp, Artificial Sequence
  Synthetic
ggtgaggcucctgaguacca

SEQ ID NO: 100685 - DNA, 21 bp, Artificial Sequence
  Synthetic
gctguccaaccacatctccuc

SEQ ID NO: 100686 - DNA, 19 bp, Artificial Sequence
  Synthetic
ggcaaagcucacacugacc

SEQ ID NO: 100687 - DNA, 21 bp, Artificial Sequence
  Synthetic
actgucaagagccccaucaga

SEQ ID NO: 100688 - DNA, 17 bp, Artificial Sequence
  Synthetic
ggtcccauggctgguga

SEQ ID NO: 100689 - DNA, 19 bp, Artificial Sequence
  Synthetic
ggatguccctcugcaggat

SEQ ID NO: 100690 - DNA, 20 bp, Artificial Sequence
  Synthetic
tggaatgcugagcagctguc

SEQ ID NO: 100691 - DNA, 18 bp, Artificial Sequence
  Synthetic
gaggagcuggtggtcugt

SEQ ID NO: 100692 - DNA, 17 bp, Artificial Sequence
  Synthetic
aggtgugcgggcucaag

SEQ ID NO: 100693 - DNA, 19 bp, Artificial Sequence
  Synthetic
ctctuccgttccugccagt

SEQ ID NO: 100694 - DNA, 21 bp, Artificial Sequence
  Synthetic
agauctggtccucacggaaca

SEQ ID NO: 100695 - DNA, 21 bp, Artificial Sequence
  Synthetic
gatgcagcuctgatccucact

SEQ ID NO: 100696 - DNA, 18 bp, Artificial Sequence
  Synthetic
gcucagcgcatcugccat

SEQ ID NO: 100697 - DNA, 20 bp, Artificial Sequence
  Synthetic
ggaaggcagaguccaugcaa

SEQ ID NO: 100698 - DNA, 19 bp, Artificial Sequence
  Synthetic
gcccccagggutcgattut

SEQ ID NO: 100699 - DNA, 19 bp, Artificial Sequence
  Synthetic
cgtgaagccucatgcuggt

SEQ ID NO: 100700 - DNA, 22 bp, Artificial Sequence
  Synthetic
ggatgtagagcuccacctucct

SEQ ID NO: 100701 - DNA, 20 bp, Artificial Sequence
  Synthetic
cgtggccucgtttctcaaug

SEQ ID NO: 100702 - DNA, 19 bp, Artificial Sequence
  Synthetic
gguagcggcagagcaucac

SEQ ID NO: 100703 - DNA, 24 bp, Artificial Sequence
  Synthetic
caaacctcctucatctgctcctut

SEQ ID NO: 100704 - DNA, 26 bp, Artificial Sequence
  Synthetic
tgttatacctgcuttactgccttugg

SEQ ID NO: 100705 - DNA, 27 bp, Artificial Sequence
  Synthetic
cccctcctccugctaatgatatttuat

SEQ ID NO: 100706 - DNA, 19 bp, Artificial Sequence
  Synthetic
cctgcautgatggcuccgt

SEQ ID NO: 100707 - DNA, 20 bp, Artificial Sequence
  Synthetic
ctgcccagagugtgcactua

SEQ ID NO: 100708 - DNA, 20 bp, Artificial Sequence
  Synthetic
ctcagugcctcgucacagat

SEQ ID NO: 100709 - DNA, 21 bp, Artificial Sequence
  Synthetic
acctactgcagaugctgtguc

SEQ ID NO: 100710 - DNA, 21 bp, Artificial Sequence
  Synthetic
gacgtcauctgagttggugga

SEQ ID NO: 100711 - DNA, 21 bp, Artificial Sequence
  Synthetic
gccctugaaccaggugaacag

SEQ ID NO: 100712 - DNA, 17 bp, Artificial Sequence
  Synthetic
cctcgtugccccucacc

SEQ ID NO: 100713 - DNA, 18 bp, Artificial Sequence
  Synthetic
agtgccuggcgtgaacuc

SEQ ID NO: 100714 - DNA, 21 bp, Artificial Sequence
  Synthetic
gcctcatcucaccaacagcut

SEQ ID NO: 100715 - DNA, 26 bp, Artificial Sequence
  Synthetic
ggtgctttaaggugaaacagactuac

SEQ ID NO: 100716 - DNA, 23 bp, Artificial Sequence
  Synthetic
ccattaccucagacttctuggca

SEQ ID NO: 100717 - DNA, 31 bp, Artificial Sequence
  Synthetic
tttgtgtacaacuggataactacttgaacut

SEQ ID NO: 100718 - DNA, 25 bp, Artificial Sequence
  Synthetic
ctcctcccaccucttaaagttauga

SEQ ID NO: 100719 - DNA, 27 bp, Artificial Sequence
  Synthetic
cacggaggautaaaacttucaagacaa

SEQ ID NO: 100720 - DNA, 22 bp, Artificial Sequence
  Synthetic
agaacugaaccaaaggcacuga

SEQ ID NO: 100721 - DNA, 22 bp, Artificial Sequence
  Synthetic
ctguccccacggaaggttauag

SEQ ID NO: 100722 - DNA, 27 bp, Artificial Sequence
  Synthetic
gcatagcaacaautctcccacctttua

SEQ ID NO: 100723 - DNA, 31 bp, Artificial Sequence
  Synthetic
attttcaagtttctuctctgttctgtttugt

SEQ ID NO: 100724 - DNA, 24 bp, Artificial Sequence
  Synthetic
gcaatgaacucatttgtuccccaa

SEQ ID NO: 100725 - DNA, 28 bp, Artificial Sequence
  Synthetic
gcagaattgugagaagctggagaauaat

SEQ ID NO: 100726 - DNA, 23 bp, Artificial Sequence
  Synthetic
aagagtcgugtgcttgatgucat

SEQ ID NO: 100727 - DNA, 33 bp, Artificial Sequence
  Synthetic
acatttttgcataacugcatagatacaatttut

SEQ ID NO: 100728 - DNA, 19 bp, Artificial Sequence
  Synthetic
ctcucggtgcugagagcaa

SEQ ID NO: 100729 - DNA, 23 bp, Artificial Sequence
  Synthetic
cctcacgutaatcctguggaagt

SEQ ID NO: 100730 - DNA, 26 bp, Artificial Sequence
  Synthetic
actcctttcuttttgagcaguacaca

SEQ ID NO: 100731 - DNA, 26 bp, Artificial Sequence
  Synthetic
ctgatgcctguttttctttctcctut

SEQ ID NO: 100732 - DNA, 23 bp, Artificial Sequence
  Synthetic
ctaccacgcuactaccataugcc

SEQ ID NO: 100733 - DNA, 21 bp, Artificial Sequence
  Synthetic
ggagtucaccaggccacatut

SEQ ID NO: 100734 - DNA, 18 bp, Artificial Sequence
  Synthetic
gagccaacuggagcguga

SEQ ID NO: 100735 - DNA, 17 bp, Artificial Sequence
  Synthetic
cgaggagcccgcutgut

SEQ ID NO: 100736 - DNA, 24 bp, Artificial Sequence
  Synthetic
tutggaaagagcugaacacaagga

SEQ ID NO: 100737 - DNA, 24 bp, Artificial Sequence
  Synthetic
ctgcaucaaaatggttuccaggac

SEQ ID NO: 100738 - DNA, 28 bp, Artificial Sequence
  Synthetic
aagtttattctutcacaggtaucacggt

SEQ ID NO: 100739 - DNA, 28 bp, Artificial Sequence
  Synthetic
aaccagcctaaauttcaaatacctccut

SEQ ID NO: 100740 - DNA, 21 bp, Artificial Sequence
  Synthetic
ctgcccugagctttcccaaua

SEQ ID NO: 100741 - DNA, 22 bp, Artificial Sequence
  Synthetic
gcuaagacaaacaugcggacag

SEQ ID NO: 100742 - DNA, 25 bp, Artificial Sequence
  Synthetic
gcctctcttuggttcataaggtgut

SEQ ID NO: 100743 - DNA, 28 bp, Artificial Sequence
  Synthetic
cagtgacatcaauaccctctatttcugt

SEQ ID NO: 100744 - DNA, 26 bp, Artificial Sequence
  Synthetic
ctgaaggcagucattcttctggauat

SEQ ID NO: 100745 - DNA, 27 bp, Artificial Sequence
  Synthetic
gataatttgcgguaaaagccttucagt

SEQ ID NO: 100746 - DNA, 22 bp, Artificial Sequence
  Synthetic
cacugaaaggctttuaccgcaa

SEQ ID NO: 100747 - DNA, 28 bp, Artificial Sequence
  Synthetic
tggaatctcauagaatttttggcugact

SEQ ID NO: 100748 - DNA, 18 bp, Artificial Sequence
  Synthetic
cuacccgcagagcacucc

SEQ ID NO: 100749 - DNA, 21 bp, Artificial Sequence
  Synthetic
actggcagacucgagactgua

SEQ ID NO: 100750 - DNA, 21 bp, Artificial Sequence
  Synthetic
gggagttggcaugaccctcua

SEQ ID NO: 100751 - DNA, 22 bp, Artificial Sequence
  Synthetic
cctccttaggugtccctcaaug

SEQ ID NO: 100752 - DNA, 18 bp, Artificial Sequence
  Synthetic
ctctgcccaugcctucca

SEQ ID NO: 100753 - DNA, 18 bp, Artificial Sequence
  Synthetic
gccucagggagcucacca

SEQ ID NO: 100754 - DNA, 23 bp, Artificial Sequence
  Synthetic
ggaaaacuguggaccagaaccat

SEQ ID NO: 100755 - DNA, 24 bp, Artificial Sequence
  Synthetic
ttcccaaaggugaaatggatguga

SEQ ID NO: 100756 - DNA, 24 bp, Artificial Sequence
  Synthetic
agtggaaatgauggcaaatgccua

SEQ ID NO: 100757 - DNA, 27 bp, Artificial Sequence
  Synthetic
cagaaactaugcaaactagugaagcat

SEQ ID NO: 100758 - DNA, 26 bp, Artificial Sequence
  Synthetic
tgttttgcuccatcatttcugacact

SEQ ID NO: 100759 - DNA, 26 bp, Artificial Sequence
  Synthetic
cctgcaagtauaagttgtgcttccut

SEQ ID NO: 100760 - DNA, 18 bp, Artificial Sequence
  Synthetic
ctgccccacucacctcuc

SEQ ID NO: 100761 - DNA, 23 bp, Artificial Sequence
  Synthetic
ggcatcgugttctcattcuggat

SEQ ID NO: 100762 - DNA, 18 bp, Artificial Sequence
  Synthetic
cctgctucgccagaucgt

SEQ ID NO: 100763 - DNA, 17 bp, Artificial Sequence
  Synthetic
ggacaccugaggcugct

SEQ ID NO: 100764 - DNA, 22 bp, Artificial Sequence
  Synthetic
acatcaccaccugcaaauaccc

SEQ ID NO: 100765 - DNA, 28 bp, Artificial Sequence
  Synthetic
ggaattgtctgtugactagtgattguct

SEQ ID NO: 100766 - DNA, 21 bp, Artificial Sequence
  Synthetic
gaguaccccaaucgagccaaa

SEQ ID NO: 100767 - DNA, 24 bp, Artificial Sequence
  Synthetic
catgacaatugatttccccguagg

SEQ ID NO: 100768 - DNA, 20 bp, Artificial Sequence
  Synthetic
ggacatgccugtgccctuaa

SEQ ID NO: 100769 - DNA, 21 bp, Artificial Sequence
  Synthetic
ccaccaugugaggagagaacc

SEQ ID NO: 100770 - DNA, 24 bp, Artificial Sequence
  Synthetic
tgactccaaauaggagacgucaga

SEQ ID NO: 100771 - DNA, 26 bp, Artificial Sequence
  Synthetic
tggaagcaggucttttatttggguaa

SEQ ID NO: 100772 - DNA, 22 bp, Artificial Sequence
  Synthetic
cgccaaaaucatccctgtguct

SEQ ID NO: 100773 - DNA, 21 bp, Artificial Sequence
  Synthetic
gcaggtacugaacacauggct

SEQ ID NO: 100774 - DNA, 19 bp, Artificial Sequence
  Synthetic
cuggccuccaagagcaaga

SEQ ID NO: 100775 - DNA, 18 bp, Artificial Sequence
  Synthetic
ggcttgcuccgaaugggt

SEQ ID NO: 100776 - DNA, 19 bp, Artificial Sequence
  Synthetic
cacagccuggtctccaguc

SEQ ID NO: 100777 - DNA, 19 bp, Artificial Sequence
  Synthetic
gaatccaggcugccgctua

SEQ ID NO: 100778 - DNA, 19 bp, Artificial Sequence
  Synthetic
ccactcccuctgcagctut

SEQ ID NO: 100779 - DNA, 19 bp, Artificial Sequence
  Synthetic
caucugcccagaggaggag

SEQ ID NO: 100780 - DNA, 18 bp, Artificial Sequence
  Synthetic
cagctggcuctccacuct

SEQ ID NO: 100781 - DNA, 18 bp, Artificial Sequence
  Synthetic
agagctgugggcauggac

SEQ ID NO: 100782 - DNA, 17 bp, Artificial Sequence
  Synthetic
ccagccucccctccugt

SEQ ID NO: 100783 - DNA, 21 bp, Artificial Sequence
  Synthetic
ggagcttagugggcagactug

SEQ ID NO: 100784 - DNA, 17 bp, Artificial Sequence
  Synthetic
gggcagacucgcuccaa

SEQ ID NO: 100785 - DNA, 20 bp, Artificial Sequence
  Synthetic
agagctgugtgcctcaaugg

SEQ ID NO: 100786 - DNA, 20 bp, Artificial Sequence
  Synthetic
cagcctcuttccctggucac

SEQ ID NO: 100787 - DNA, 23 bp, Artificial Sequence
  Synthetic
tgctgttgtuaccagccacttua

SEQ ID NO: 100788 - DNA, 21 bp, Artificial Sequence
  Synthetic
gaactgggagucaggtggtug

SEQ ID NO: 100789 - DNA, 21 bp, Artificial Sequence
  Synthetic
ccggtttcccugctgatttug

SEQ ID NO: 100790 - DNA, 20 bp, Artificial Sequence
  Synthetic
ggacgcaguggctgtgtauc

SEQ ID NO: 100791 - DNA, 20 bp, Artificial Sequence
  Synthetic
gcccatguccaccgtaucat

SEQ ID NO: 100792 - DNA, 23 bp, Artificial Sequence
  Synthetic
gatcccttttcugctgctgtgua

SEQ ID NO: 100793 - DNA, 21 bp, Artificial Sequence
  Synthetic
ctcagcacugacauccagacc

SEQ ID NO: 100794 - DNA, 26 bp, Artificial Sequence
  Synthetic
autcttttaccucaaaaccacccaat

SEQ ID NO: 100795 - DNA, 26 bp, Artificial Sequence
  Synthetic
gtattcauggaagatgtuggagcaga

SEQ ID NO: 100796 - DNA, 28 bp, Artificial Sequence
  Synthetic
tgctattctccutactccaaatgtugac

SEQ ID NO: 100797 - DNA, 24 bp, Artificial Sequence
  Synthetic
tcagcagacaacautggauacacc

SEQ ID NO: 100798 - DNA, 28 bp, Artificial Sequence
  Synthetic
gaaacacaaugaagagaaaauggaagca

SEQ ID NO: 100799 - DNA, 22 bp, Artificial Sequence
  Synthetic
gtttgtccuttccctugagcag

SEQ ID NO: 100800 - DNA, 28 bp, Artificial Sequence
  Synthetic
gcgtataucacacaaagtaugacccaat

SEQ ID NO: 100801 - DNA, 24 bp, Artificial Sequence
  Synthetic
gugaaaguaaccacagcaaccaag

SEQ ID NO: 100802 - DNA, 26 bp, Artificial Sequence
  Synthetic
tgcacaaaauacatactgauccaggt

SEQ ID NO: 100803 - DNA, 25 bp, Artificial Sequence
  Synthetic
cacccctucccttaaacttctuaca

SEQ ID NO: 100804 - DNA, 27 bp, Artificial Sequence
  Synthetic
aatggataccttutgcgttctagtuga

SEQ ID NO: 100805 - DNA, 27 bp, Artificial Sequence
  Synthetic
tgtctctaatgcgguctcataatgaug

SEQ ID NO: 100806 - DNA, 23 bp, Artificial Sequence
  Synthetic
agctttttgauctggagcucgat

SEQ ID NO: 100807 - DNA, 23 bp, Artificial Sequence
  Synthetic
gagutgaggaugaagcagaacct

SEQ ID NO: 100808 - DNA, 22 bp, Artificial Sequence
  Synthetic
gttaaactgcugccacttcugg

SEQ ID NO: 100809 - DNA, 28 bp, Artificial Sequence
  Synthetic
ctgccaaccuatgtttaaagcattucat

SEQ ID NO: 100810 - DNA, 26 bp, Artificial Sequence
  Synthetic
caaaacuggaagaacatcagaaugct

SEQ ID NO: 100811 - DNA, 26 bp, Artificial Sequence
  Synthetic
ttcctttctgutcttatagacgugcc

SEQ ID NO: 100812 - DNA, 21 bp, Artificial Sequence
  Synthetic
ttctgcgcccacuagcatuat

SEQ ID NO: 100813 - DNA, 28 bp, Artificial Sequence
  Synthetic
ctgttttaaaccauagtgagtttgugct

SEQ ID NO: 100814 - DNA, 24 bp, Artificial Sequence
  Synthetic
gggaaactgtuctcttccattcuc

SEQ ID NO: 100815 - DNA, 22 bp, Artificial Sequence
  Synthetic
gaggauaaacctgtugccacca

SEQ ID NO: 100816 - DNA, 22 bp, Artificial Sequence
  Synthetic
gcctgcagcucctgtatgtuac

SEQ ID NO: 100817 - DNA, 28 bp, Artificial Sequence
  Synthetic
tttcaaaggaagcugtggtacaatauga

SEQ ID NO: 100818 - DNA, 22 bp, Artificial Sequence
  Synthetic
cctgggtugagttccaactuga

SEQ ID NO: 100819 - DNA, 25 bp, Artificial Sequence
  Synthetic
tcaaagcuguacaagaaagcaggat

SEQ ID NO: 100820 - DNA, 27 bp, Artificial Sequence
  Synthetic
ttttgtaggttcugcagcatatctuga

SEQ ID NO: 100821 - DNA, 23 bp, Artificial Sequence
  Synthetic
cacccacacacauagtgauacca

SEQ ID NO: 100822 - DNA, 26 bp, Artificial Sequence
  Synthetic
agctagagagagguaggaaacactut

SEQ ID NO: 100823 - DNA, 22 bp, Artificial Sequence
  Synthetic
ccucgtuaaaagcagggaacag

SEQ ID NO: 100824 - DNA, 22 bp, Artificial Sequence
  Synthetic
caacatcgcuctcctccttcuc

SEQ ID NO: 100825 - DNA, 25 bp, Artificial Sequence
  Synthetic
agtggagccacuttggtatcatuac

SEQ ID NO: 100826 - DNA, 26 bp, Artificial Sequence
  Synthetic
aautgataagcuaaccagagccagac

SEQ ID NO: 100827 - DNA, 22 bp, Artificial Sequence
  Synthetic
tcctuggtcagaaugagaggaa

SEQ ID NO: 100828 - DNA, 27 bp, Artificial Sequence
  Synthetic
gggctgtatcuaactaaagtgtttuga

SEQ ID NO: 100829 - DNA, 25 bp, Artificial Sequence
  Synthetic
atcagaaggaagcaaugcacauact

SEQ ID NO: 100830 - DNA, 22 bp, Artificial Sequence
  Synthetic
tccagcagugaaaatggcuaca

SEQ ID NO: 100831 - DNA, 28 bp, Artificial Sequence
  Synthetic
ctggaaattggguacgatactgtatcut

SEQ ID NO: 100832 - DNA, 25 bp, Artificial Sequence
  Synthetic
ttctgcttttccugtagcaagauca

SEQ ID NO: 100833 - DNA, 28 bp, Artificial Sequence
  Synthetic
acaagtguggccagagaagttaaaauat

SEQ ID NO: 100834 - DNA, 28 bp, Artificial Sequence
  Synthetic
tttaagatatgauggcacccacatacug

SEQ ID NO: 100835 - DNA, 25 bp, Artificial Sequence
  Synthetic
tctccttcuagcaagtgaggatuct

SEQ ID NO: 100836 - DNA, 21 bp, Artificial Sequence
  Synthetic
cctcatccacucttgctcuca

SEQ ID NO: 100837 - DNA, 29 bp, Artificial Sequence
  Synthetic
agacaagaggutttagagagtagucaagt

SEQ ID NO: 100838 - DNA, 24 bp, Artificial Sequence
  Synthetic
gcacaagaaucctaugaaaaggca

SEQ ID NO: 100839 - DNA, 21 bp, Artificial Sequence
  Synthetic
gattcaugcacacgucaagca

SEQ ID NO: 100840 - DNA, 18 bp, Artificial Sequence
  Synthetic
gcctuggccttgcuccat

SEQ ID NO: 100841 - DNA, 22 bp, Artificial Sequence
  Synthetic
gctggtggtutcccattctcua

SEQ ID NO: 100842 - DNA, 20 bp, Artificial Sequence
  Synthetic
cccctagugagctacgcugt

SEQ ID NO: 100843 - DNA, 23 bp, Artificial Sequence
  Synthetic
ctaactgggaucgctauggcaat

SEQ ID NO: 100844 - DNA, 20 bp, Artificial Sequence
  Synthetic
gcttgcagacuagccacugt

SEQ ID NO: 100845 - DNA, 28 bp, Artificial Sequence
  Synthetic
gaagaagctgagaaugtgatgaaatuca

SEQ ID NO: 100846 - DNA, 21 bp, Artificial Sequence
  Synthetic
actgagcgguggtttcatuca

SEQ ID NO: 100847 - DNA, 26 bp, Artificial Sequence
  Synthetic
tgatggatactautgcacaccaaugt

SEQ ID NO: 100848 - DNA, 23 bp, Artificial Sequence
  Synthetic
gttcattcctagugctgggtgua

SEQ ID NO: 100849 - DNA, 29 bp, Artificial Sequence
  Synthetic
gaagatgttcgtuggttggtattctauga

SEQ ID NO: 100850 - DNA, 22 bp, Artificial Sequence
  Synthetic
ccacccgcacuagccttatuaa

SEQ ID NO: 100851 - DNA, 29 bp, Artificial Sequence
  Synthetic
gctggctaaguaacaccaataaaatguct

SEQ ID NO: 100852 - DNA, 25 bp, Artificial Sequence
  Synthetic
tgcggaagcucgtacttgaaauaat

SEQ ID NO: 100853 - DNA, 29 bp, Artificial Sequence
  Synthetic
aaagttttacauacggctauacgacaaga

SEQ ID NO: 100854 - DNA, 24 bp, Artificial Sequence
  Synthetic
tgaguaaagccaccttctguacct

SEQ ID NO: 100855 - DNA, 24 bp, Artificial Sequence
  Synthetic
gaactctgugagtggttgacucaa

SEQ ID NO: 100856 - DNA, 26 bp, Artificial Sequence
  Synthetic
attgtttccaguctgtgaagttccut

SEQ ID NO: 100857 - DNA, 28 bp, Artificial Sequence
  Synthetic
agccttaatgaauaccagcccaaatuat

SEQ ID NO: 100858 - DNA, 28 bp, Artificial Sequence
  Synthetic
cagaagtcgttucccatcatctaauact

SEQ ID NO: 100859 - DNA, 26 bp, Artificial Sequence
  Synthetic
aggtaatgggaacautgtagguacca

SEQ ID NO: 100860 - DNA, 27 bp, Artificial Sequence
  Synthetic
tccattcugagaaactttgcttuccat

SEQ ID NO: 100861 - DNA, 28 bp, Artificial Sequence
  Synthetic
ggtcttctcuctgataatcatttugcct

SEQ ID NO: 100862 - DNA, 28 bp, Artificial Sequence
  Synthetic
tggaagagatacaaugatgcacaatuct

SEQ ID NO: 100863 - DNA, 24 bp, Artificial Sequence
  Synthetic
ccccuttgaatgtatuggaacagg

SEQ ID NO: 100864 - DNA, 21 bp, Artificial Sequence
  Synthetic
agggctgugtttgtcagtugt

SEQ ID NO: 100865 - DNA, 22 bp, Artificial Sequence
  Synthetic
caaacgtgcucaccaacttcut

SEQ ID NO: 100866 - DNA, 22 bp, Artificial Sequence
  Synthetic
cccccacacuctcaattttgug

SEQ ID NO: 100867 - DNA, 21 bp, Artificial Sequence
  Synthetic
cgtgaacuggcctttcagcut

SEQ ID NO: 100868 - DNA, 23 bp, Artificial Sequence
  Synthetic
ccactgcccugagaatcttttuc

SEQ ID NO: 100869 - DNA, 26 bp, Artificial Sequence
  Synthetic
gtgttggttugtttggaatctucaca

SEQ ID NO: 100870 - DNA, 21 bp, Artificial Sequence
  Synthetic
gatgtaccccugcagcugaat

SEQ ID NO: 100871 - DNA, 26 bp, Artificial Sequence
  Synthetic
ggctgaagauggactcaaagaattug

SEQ ID NO: 100872 - DNA, 22 bp, Artificial Sequence
  Synthetic
tgcacaagacccugtcttucag

SEQ ID NO: 100873 - DNA, 26 bp, Artificial Sequence
  Synthetic
aaggatccaaucagcttcaacacuaa

SEQ ID NO: 100874 - DNA, 23 bp, Artificial Sequence
  Synthetic
gggtgtggugaaggattctccua

SEQ ID NO: 100875 - DNA, 24 bp, Artificial Sequence
  Synthetic
actacattccaagucctccacuca

SEQ ID NO: 100876 - DNA, 27 bp, Artificial Sequence
  Synthetic
gcctctttaautcaatgattccugcat

SEQ ID NO: 100877 - DNA, 26 bp, Artificial Sequence
  Synthetic
augttttacauggagaggaggaacac

SEQ ID NO: 100878 - DNA, 27 bp, Artificial Sequence
  Synthetic
ttttggaaaaguagcatgtctugacac

SEQ ID NO: 100879 - DNA, 21 bp, Artificial Sequence
  Synthetic
gcgtgagccutgaggagacua

SEQ ID NO: 100880 - DNA, 26 bp, Artificial Sequence
  Synthetic
agtgatcttttucctgtttgacacut

SEQ ID NO: 100881 - DNA, 19 bp, Artificial Sequence
  Synthetic
ggcagauggccaggtaucc

SEQ ID NO: 100882 - DNA, 21 bp, Artificial Sequence
  Synthetic
ggcctggaaggugaacatgua

SEQ ID NO: 100883 - DNA, 19 bp, Artificial Sequence
  Synthetic
gcacgcaccuguaggagag

SEQ ID NO: 100884 - DNA, 25 bp, Artificial Sequence
  Synthetic
gtgttgcttucactctgttttucgt

SEQ ID NO: 100885 - DNA, 22 bp, Artificial Sequence
  Synthetic
gcauaaagacggagaucagcct

SEQ ID NO: 100886 - DNA, 27 bp, Artificial Sequence
  Synthetic
cgtctcttcccugttttaggttttuca

SEQ ID NO: 100887 - DNA, 21 bp, Artificial Sequence
  Synthetic
cccctccuccacaatgatcut

SEQ ID NO: 100888 - DNA, 25 bp, Artificial Sequence
  Synthetic
gtgtgttttuaagccggatucagat

SEQ ID NO: 100889 - DNA, 23 bp, Artificial Sequence
  Synthetic
cccauacagaggcacatgatcut

SEQ ID NO: 100890 - DNA, 19 bp, Artificial Sequence
  Synthetic
gtagtgucccacgugcaca

SEQ ID NO: 100891 - DNA, 25 bp, Artificial Sequence
  Synthetic
gacaagcagaaggaguttcatcuct

SEQ ID NO: 100892 - DNA, 20 bp, Artificial Sequence
  Synthetic
cagatgcugacccacuggac

SEQ ID NO: 100893 - DNA, 26 bp, Artificial Sequence
  Synthetic
gtaaaggtucaaagtgaatgccugaa

SEQ ID NO: 100894 - DNA, 22 bp, Artificial Sequence
  Synthetic
gcaacaaccccagcuacauaga

SEQ ID NO: 100895 - DNA, 24 bp, Artificial Sequence
  Synthetic
tgtucaacagagtcugaggaaagg

SEQ ID NO: 100896 - DNA, 23 bp, Artificial Sequence
  Synthetic
attttggugacccaugggagaat

SEQ ID NO: 100897 - DNA, 20 bp, Artificial Sequence
  Synthetic
gctcgatutgtgccgucagt

SEQ ID NO: 100898 - DNA, 23 bp, Artificial Sequence
  Synthetic
ccttugcaagcacaggttgtuag

SEQ ID NO: 100899 - DNA, 28 bp, Artificial Sequence
  Synthetic
ccgtgaacaccauaatagaaaaggugaa

SEQ ID NO: 100900 - DNA, 22 bp, Artificial Sequence
  Synthetic
caacccaaucccacacgactua

SEQ ID NO: 100901 - DNA, 19 bp, Artificial Sequence
  Synthetic
cagcgaucaucgaggagga

SEQ ID NO: 100902 - DNA, 27 bp, Artificial Sequence
  Synthetic
ggcgattccuccttctttgttaactua

SEQ ID NO: 100903 - DNA, 29 bp, Artificial Sequence
  Synthetic
aggtcttatgtcugtgttgctctctauat

SEQ ID NO: 100904 - DNA, 29 bp, Artificial Sequence
  Synthetic
gtgctctatttuaagtatgcagctgauct

SEQ ID NO: 100905 - DNA, 21 bp, Artificial Sequence
  Synthetic
agtuggccacacggatgtaug

SEQ ID NO: 100906 - DNA, 22 bp, Artificial Sequence
  Synthetic
tgaagggaccaaaugccaacut

SEQ ID NO: 100907 - DNA, 21 bp, Artificial Sequence
  Synthetic
tcatcgatguctggcacacug

SEQ ID NO: 100908 - DNA, 20 bp, Artificial Sequence
  Synthetic
accgucggagctcatcuagt

SEQ ID NO: 100909 - DNA, 28 bp, Artificial Sequence
  Synthetic
gcaacaacaauagcaaaatcacaugaga

SEQ ID NO: 100910 - DNA, 24 bp, Artificial Sequence
  Synthetic
tccagauagcaggaaauggacaga

SEQ ID NO: 100911 - DNA, 24 bp, Artificial Sequence
  Synthetic
tctccaccatauaagggaccguag

SEQ ID NO: 100912 - DNA, 25 bp, Artificial Sequence
  Synthetic
tccaaactacggucccttatauggt

SEQ ID NO: 100913 - DNA, 28 bp, Artificial Sequence
  Synthetic
gctataagcacauccttggctacatuat

SEQ ID NO: 100914 - DNA, 20 bp, Artificial Sequence
  Synthetic
cgaguggtccugaggacaga

SEQ ID NO: 100915 - DNA, 17 bp, Artificial Sequence
  Synthetic
gcggcuccgagaugacc

SEQ ID NO: 100916 - DNA, 25 bp, Artificial Sequence
  Synthetic
cctgcaaagaugattttgaccauga

SEQ ID NO: 100917 - DNA, 21 bp, Artificial Sequence
  Synthetic
ttacccugatggcguacaacc

SEQ ID NO: 100918 - DNA, 17 bp, Artificial Sequence
  Synthetic
caggcgggugacgtuga

SEQ ID NO: 100919 - DNA, 20 bp, Artificial Sequence
  Synthetic
ccacaacccutgtcccugag

SEQ ID NO: 100920 - DNA, 25 bp, Artificial Sequence
  Synthetic
ggacatcccaaaaugaccctaacug

SEQ ID NO: 100921 - DNA, 28 bp, Artificial Sequence
  Synthetic
ccatgtatgcaucagtctcttaggauct

SEQ ID NO: 100922 - DNA, 32 bp, Artificial Sequence
  Synthetic
aataaggctgtgauataaatagtgtguaaagt

SEQ ID NO: 100923 - DNA, 26 bp, Artificial Sequence
  Synthetic
caggaaaggagcutacagaaattugg

SEQ ID NO: 100924 - DNA, 28 bp, Artificial Sequence
  Synthetic
ggtgggtgacacucttttaataatuggt

SEQ ID NO: 100925 - DNA, 28 bp, Artificial Sequence
  Synthetic
agatcctgttatgucatctatgggtcut

SEQ ID NO: 100926 - DNA, 26 bp, Artificial Sequence
  Synthetic
gttgatcttaatugttgcctgtggut

SEQ ID NO: 100927 - DNA, 22 bp, Artificial Sequence
  Synthetic
ttacaucaccaacgcagtccut

SEQ ID NO: 100928 - DNA, 22 bp, Artificial Sequence
  Synthetic
gtgtgtgtauctgagtgccuga

SEQ ID NO: 100929 - DNA, 27 bp, Artificial Sequence
  Synthetic
agauggacggattcauggaaagaaaat

SEQ ID NO: 100930 - DNA, 23 bp, Artificial Sequence
  Synthetic
aaacgtagucgtctcugcaacaa

SEQ ID NO: 100931 - DNA, 23 bp, Artificial Sequence
  Synthetic
gctgacugcagcattcaguaaaa

SEQ ID NO: 100932 - DNA, 27 bp, Artificial Sequence
  Synthetic
cataagacaaucgctaaggttacuggt

SEQ ID NO: 100933 - DNA, 20 bp, Artificial Sequence
  Synthetic
catccgcaucccaggagtuc

SEQ ID NO: 100934 - DNA, 25 bp, Artificial Sequence
  Synthetic
tcgagacacggutccctaattauct

SEQ ID NO: 100935 - DNA, 23 bp, Artificial Sequence
  Synthetic
gcctctctuggaagttctcacuc

SEQ ID NO: 100936 - DNA, 17 bp, Artificial Sequence
  Synthetic
ttgcgacgugtgugggt

SEQ ID NO: 100937 - DNA, 20 bp, Artificial Sequence
  Synthetic
ggcugagctttugggacaga

SEQ ID NO: 100938 - DNA, 20 bp, Artificial Sequence
  Synthetic
ggctccaaucccggttcaua

SEQ ID NO: 100939 - DNA, 24 bp, Artificial Sequence
  Synthetic
tcaatactgugctttgcacucaca

SEQ ID NO: 100940 - DNA, 18 bp, Artificial Sequence
  Synthetic
gcctgccccguttctcut

SEQ ID NO: 100941 - DNA, 22 bp, Artificial Sequence
  Synthetic
ccggtcataguaacgggagaug

SEQ ID NO: 100942 - DNA, 19 bp, Artificial Sequence
  Synthetic
ggcaucgagcaugacaacc

SEQ ID NO: 100943 - DNA, 23 bp, Artificial Sequence
  Synthetic
tcatctccuaaacacccctguct

SEQ ID NO: 100944 - DNA, 26 bp, Artificial Sequence
  Synthetic
aaccctttuacggagtctttcatcuc

SEQ ID NO: 100945 - DNA, 24 bp, Artificial Sequence
  Synthetic
agaagggugaagctctttuggaac

SEQ ID NO: 100946 - DNA, 22 bp, Artificial Sequence
  Synthetic
tttaaagugacgtccugcacca

SEQ ID NO: 100947 - DNA, 27 bp, Artificial Sequence
  Synthetic
gtaugtattcatcttguccacggagat

SEQ ID NO: 100948 - DNA, 32 bp, Artificial Sequence
  Synthetic
aaagacttttcucattaatgtaattugaagca

SEQ ID NO: 100949 - DNA, 24 bp, Artificial Sequence
  Synthetic
agattugacaagagcacagauggt

SEQ ID NO: 100950 - DNA, 21 bp, Artificial Sequence
  Synthetic
ctatcucaaacacgcaugcct

SEQ ID NO: 100951 - DNA, 28 bp, Artificial Sequence
  Synthetic
acaattccatgtuctccagaagcatuaa

SEQ ID NO: 100952 - DNA, 24 bp, Artificial Sequence
  Synthetic
ggctctaggaauttgaagccuaca

SEQ ID NO: 100953 - DNA, 23 bp, Artificial Sequence
  Synthetic
atttugcccaaagcaucagcaat

SEQ ID NO: 100954 - DNA, 26 bp, Artificial Sequence
  Synthetic
aaatuccagagaagaaagctauggca

SEQ ID NO: 100955 - DNA, 27 bp, Artificial Sequence
  Synthetic
gagaattaatcuggaagctggaaguct

SEQ ID NO: 100956 - DNA, 21 bp, Artificial Sequence
  Synthetic
ctgatccttuggtggcacuga

SEQ ID NO: 100957 - DNA, 21 bp, Artificial Sequence
  Synthetic
ctgctgaagcutgtgtctugg

SEQ ID NO: 100958 - DNA, 22 bp, Artificial Sequence
  Synthetic
gcatcgcccugctttcattcua

SEQ ID NO: 100959 - DNA, 21 bp, Artificial Sequence
  Synthetic
cacgatctcutcggctctcuc

SEQ ID NO: 100960 - DNA, 21 bp, Artificial Sequence
  Synthetic
gugcgcaacgccttuaaaaga

SEQ ID NO: 100961 - DNA, 22 bp, Artificial Sequence
  Synthetic
ctgcttccucacagtggagtut

SEQ ID NO: 100962 - DNA, 21 bp, Artificial Sequence
  Synthetic
ggttcgagaagucacctcucc

SEQ ID NO: 100963 - DNA, 26 bp, Artificial Sequence
  Synthetic
ttgaaattaccutggttctggugaca

SEQ ID NO: 100964 - DNA, 20 bp, Artificial Sequence
  Synthetic
gcctgaucccaagucgaaca

SEQ ID NO: 100965 - DNA, 23 bp, Artificial Sequence
  Synthetic
gagtggaaaucctcactgtccuc

SEQ ID NO: 100966 - DNA, 20 bp, Artificial Sequence
  Synthetic
tccaccugucagaggacgag

SEQ ID NO: 100967 - DNA, 21 bp, Artificial Sequence
  Synthetic
tgaaccaccuaggcuggagaa

SEQ ID NO: 100968 - DNA, 22 bp, Artificial Sequence
  Synthetic
gttcctcccuctgaatcugcaa

SEQ ID NO: 100969 - DNA, 18 bp, Artificial Sequence
  Synthetic
ccaccccuctgtggucat

SEQ ID NO: 100970 - DNA, 27 bp, Artificial Sequence
  Synthetic
tttgccttactguttaggaatgaccut

SEQ ID NO: 100971 - DNA, 27 bp, Artificial Sequence
  Synthetic
gtcatcatctucacaagcaaaauggac

SEQ ID NO: 100972 - DNA, 20 bp, Artificial Sequence
  Synthetic
ggacccacuggatcctuacc

SEQ ID NO: 100973 - DNA, 26 bp, Artificial Sequence
  Synthetic
gcttcttugaattccaagugcaagat

SEQ ID NO: 100974 - DNA, 20 bp, Artificial Sequence
  Synthetic
acaccuacacuccgggagaa

SEQ ID NO: 100975 - DNA, 26 bp, Artificial Sequence
  Synthetic
gggagcacatuaaggaccaatataug

SEQ ID NO: 100976 - DNA, 21 bp, Artificial Sequence
  Synthetic
gtgcttggcuttcatcgucag

SEQ ID NO: 100977 - DNA, 23 bp, Artificial Sequence
  Synthetic
ctgcaggaagaugaacgctacua

SEQ ID NO: 100978 - DNA, 29 bp, Artificial Sequence
  Synthetic
acctttacctcuagtgacaaatctctuga

SEQ ID NO: 100979 - DNA, 25 bp, Artificial Sequence
  Synthetic
attccattcugcctgataagcaugt

SEQ ID NO: 100980 - DNA, 21 bp, Artificial Sequence
  Synthetic
atgcugcagacgaactgtuct

SEQ ID NO: 100981 - DNA, 25 bp, Artificial Sequence
  Synthetic
cgutttcagauacagcaaaccgaaa

SEQ ID NO: 100982 - DNA, 24 bp, Artificial Sequence
  Synthetic
tgggagtttugctgcgaatgauat

SEQ ID NO: 100983 - DNA, 27 bp, Artificial Sequence
  Synthetic
tgtccagtaaagautcttatggtugcc

SEQ ID NO: 100984 - DNA, 22 bp, Artificial Sequence
  Synthetic
ctggttgaacucatggaccuga

SEQ ID NO: 100985 - DNA, 26 bp, Artificial Sequence
  Synthetic
aaaggatcaacucacgtgtatucaca

SEQ ID NO: 100986 - DNA, 29 bp, Artificial Sequence
  Synthetic
ggaaacaattugacaagtatgaucacaca

SEQ ID NO: 100987 - DNA, 28 bp, Artificial Sequence
  Synthetic
ctgcacttatucctctttgctttuacag

SEQ ID NO: 100988 - DNA, 21 bp, Artificial Sequence
  Synthetic
cagctgtcugcatgagaccua

SEQ ID NO: 100989 - DNA, 22 bp, Artificial Sequence
  Synthetic
cugaaaguaagcaggagccagt

SEQ ID NO: 100990 - DNA, 28 bp, Artificial Sequence
  Synthetic
ctgacattaagugttctacgagauccat

SEQ ID NO: 100991 - DNA, 22 bp, Artificial Sequence
  Synthetic
catcagcuggagctcgagatuc

SEQ ID NO: 100992 - DNA, 21 bp, Artificial Sequence
  Synthetic
gatcccgucctgtccgaauaa

SEQ ID NO: 100993 - DNA, 24 bp, Artificial Sequence
  Synthetic
ctccaatattuagaagccgcugga

SEQ ID NO: 100994 - DNA, 22 bp, Artificial Sequence
  Synthetic
gcagcacaguctaacucaaggg

SEQ ID NO: 100995 - DNA, 22 bp, Artificial Sequence
  Synthetic
atgaaagcagcaaucgcctcua

SEQ ID NO: 100996 - DNA, 21 bp, Artificial Sequence
  Synthetic
ctcctcttugctggcagauca

SEQ ID NO: 100997 - DNA, 26 bp, Artificial Sequence
  Synthetic
cctggacacuatctaaaacctugcag

SEQ ID NO: 100998 - DNA, 26 bp, Artificial Sequence
  Synthetic
ttcacagcaaagaagaguactugaaa

SEQ ID NO: 100999 - DNA, 20 bp, Artificial Sequence
  Synthetic
agcaaaguggcacaatucgg

SEQ ID NO: 101000 - DNA, 23 bp, Artificial Sequence
  Synthetic
aggcaatgagugaaacaguccag

SEQ ID NO: 101001 - DNA, 27 bp, Artificial Sequence
  Synthetic
tcattctgtctutcgtttctccucaag

SEQ ID NO: 101002 - DNA, 23 bp, Artificial Sequence
  Synthetic
gcgataatcaugtccccaaugga

SEQ ID NO: 101003 - DNA, 21 bp, Artificial Sequence
  Synthetic
tgttcctucccaggttggtug

SEQ ID NO: 101004 - DNA, 22 bp, Artificial Sequence
  Synthetic
gagaaguccagatgcccugaat

SEQ ID NO: 101005 - DNA, 21 bp, Artificial Sequence
  Synthetic
gctaucggccaggttgaugac

SEQ ID NO: 101006 - DNA, 28 bp, Artificial Sequence
  Synthetic
ttaactttagttcacaucagcactgcua

SEQ ID NO: 101007 - DNA, 26 bp, Artificial Sequence
  Synthetic
cagtggttggutaatgcaaaaaucac

SEQ ID NO: 101008 - DNA, 24 bp, Artificial Sequence
  Synthetic
gtactgcuaaagaagcagcttugg

SEQ ID NO: 101009 - DNA, 25 bp, Artificial Sequence
  Synthetic
cggatttgtuaacatgctcccaaut

SEQ ID NO: 101010 - DNA, 21 bp, Artificial Sequence
  Synthetic
gcacaaaucaacgcaggctua

SEQ ID NO: 101011 - DNA, 20 bp, Artificial Sequence
  Synthetic
ccctgguaatgatgcugcct

SEQ ID NO: 101012 - DNA, 19 bp, Artificial Sequence
  Synthetic
gctcccguccaucaccaac

SEQ ID NO: 101013 - DNA, 19 bp, Artificial Sequence
  Synthetic
gcctcaccucctcttugga

SEQ ID NO: 101014 - DNA, 26 bp, Artificial Sequence
  Synthetic
gaggtataucaaaacacttggcggua

SEQ ID NO: 101015 - DNA, 28 bp, Artificial Sequence
  Synthetic
ccattaaattttugcgtcacctttucag

SEQ ID NO: 101016 - DNA, 23 bp, Artificial Sequence
  Synthetic
ctttccauacagctagcctguga

SEQ ID NO: 101017 - DNA, 28 bp, Artificial Sequence
  Synthetic
cagatgccatgutttctgaagacatuag

SEQ ID NO: 101018 - DNA, 22 bp, Artificial Sequence
  Synthetic
ttctgtttucccaagcctguca

SEQ ID NO: 101019 - DNA, 25 bp, Artificial Sequence
  Synthetic
ccagctagaacuccaggatcuacag

SEQ ID NO: 101020 - DNA, 27 bp, Artificial Sequence
  Synthetic
cgacgaaaagaaggguaaccaaaauag

SEQ ID NO: 101021 - DNA, 28 bp, Artificial Sequence
  Synthetic
gctgcagtgaugtttgtttctgtttaua

SEQ ID NO: 101022 - DNA, 24 bp, Artificial Sequence
  Synthetic
ctcttggatggcuctgtatcgtuc

SEQ ID NO: 101023 - DNA, 27 bp, Artificial Sequence
  Synthetic
tgcatgaauggccactttatttttcut

SEQ ID NO: 101024 - DNA, 28 bp, Artificial Sequence
  Synthetic
gaacaagccaagagcuattttcttucaa

SEQ ID NO: 101025 - DNA, 23 bp, Artificial Sequence
  Synthetic
tucggugaaaaccacagcaaaag

SEQ ID NO: 101026 - DNA, 24 bp, Artificial Sequence
  Synthetic
ccgtttgcuctgtttgttgaaugt

SEQ ID NO: 101027 - DNA, 26 bp, Artificial Sequence
  Synthetic
tttcactctgauaactgcctttucca

SEQ ID NO: 101028 - DNA, 29 bp, Artificial Sequence
  Synthetic
tcttcctataacgaaagugtctgctttut

SEQ ID NO: 101029 - DNA, 26 bp, Artificial Sequence
  Synthetic
gcaacccaacugttctaaagtcttut

SEQ ID NO: 101030 - DNA, 28 bp, Artificial Sequence
  Synthetic
tgtggaauaaagttgcuagaacaaaaag

SEQ ID NO: 101031 - DNA, 24 bp, Artificial Sequence
  Synthetic
attctgagtguggaaatggctuca

SEQ ID NO: 101032 - DNA, 28 bp, Artificial Sequence
  Synthetic
tgcactcacacauatagaaaccatgaut

SEQ ID NO: 101033 - DNA, 28 bp, Artificial Sequence
  Synthetic
aatctagagugtatccaaaaugccaaca

SEQ ID NO: 101034 - DNA, 28 bp, Artificial Sequence
  Synthetic
ggatgccttacuttttctttttggauga

SEQ ID NO: 101035 - DNA, 28 bp, Artificial Sequence
  Synthetic
acaaatatacaccuggacguagagaaga

SEQ ID NO: 101036 - DNA, 27 bp, Artificial Sequence
  Synthetic
gccattuccacactcagaauaacaaaa

SEQ ID NO: 101037 - DNA, 29 bp, Artificial Sequence
  Synthetic
tctactaggtacacuagtgaaagaacucc

SEQ ID NO: 101038 - DNA, 23 bp, Artificial Sequence
  Synthetic
gtacttacttgugtgggtgccut

SEQ ID NO: 101039 - DNA, 27 bp, Artificial Sequence
  Synthetic
ggctgtacacagaguaaaagtcacaut

SEQ ID NO: 101040 - DNA, 28 bp, Artificial Sequence
  Synthetic
ctatatccccaaguaaaactgacuccaa

SEQ ID NO: 101041 - DNA, 27 bp, Artificial Sequence
  Synthetic
cagaagtuagctaaagaccucacaact

SEQ ID NO: 101042 - DNA, 21 bp, Artificial Sequence
  Synthetic
ccctctccuggctcatcctua

SEQ ID NO: 101043 - DNA, 27 bp, Artificial Sequence
  Synthetic
tgttttaataggutgatcgggaucgag

SEQ ID NO: 101044 - DNA, 27 bp, Artificial Sequence
  Synthetic
tgtcttcgcuttcagcttagtuagaat

SEQ ID NO: 101045 - DNA, 28 bp, Artificial Sequence
  Synthetic
ggcttgttttgcugttcttactgattut

SEQ ID NO: 101046 - DNA, 22 bp, Artificial Sequence
  Synthetic
gatgcagcautcccacatgtut

SEQ ID NO: 101047 - DNA, 21 bp, Artificial Sequence
  Synthetic
ccagctgcucacagctctuac

SEQ ID NO: 101048 - DNA, 23 bp, Artificial Sequence
  Synthetic
gggtttcucttccttgtugcagt

SEQ ID NO: 101049 - DNA, 23 bp, Artificial Sequence
  Synthetic
ccatcttcagautctgcctgugt

SEQ ID NO: 101050 - DNA, 23 bp, Artificial Sequence
  Synthetic
gggaaaacaagguagctccugaa

SEQ ID NO: 101051 - DNA, 26 bp, Artificial Sequence
  Synthetic
atacaaggactacuccaaacagtgug

SEQ ID NO: 101052 - DNA, 24 bp, Artificial Sequence
  Synthetic
ctacaaacaaaagugccactguga

SEQ ID NO: 101053 - DNA, 24 bp, Artificial Sequence
  Synthetic
gcaaaaacuggcaaatgtgttuga

SEQ ID NO: 101054 - DNA, 25 bp, Artificial Sequence
  Synthetic
agcttgguatttctttcucagcagt

SEQ ID NO: 101055 - DNA, 24 bp, Artificial Sequence
  Synthetic
ccctgtctugtccgaatgaucaag

SEQ ID NO: 101056 - DNA, 20 bp, Artificial Sequence
  Synthetic
tttgttctgcuacgggcugt

SEQ ID NO: 101057 - DNA, 22 bp, Artificial Sequence
  Synthetic
tgagtttucccgttgcttucct

SEQ ID NO: 101058 - DNA, 25 bp, Artificial Sequence
  Synthetic
gaacaaccttttucgtgctccaaut

SEQ ID NO: 101059 - DNA, 24 bp, Artificial Sequence
  Synthetic
cgtattggcccutttggagtuagg

SEQ ID NO: 101060 - DNA, 20 bp, Artificial Sequence
  Synthetic
agaugggaccucaggaagca

SEQ ID NO: 101061 - DNA, 23 bp, Artificial Sequence
  Synthetic
tgcaatcugagcattcuccacag

SEQ ID NO: 101062 - DNA, 20 bp, Artificial Sequence
  Synthetic
ctgctgcugaactgucgaag

SEQ ID NO: 101063 - DNA, 28 bp, Artificial Sequence
  Synthetic
tgctcatgagugttggttattattucca

SEQ ID NO: 101064 - DNA, 24 bp, Artificial Sequence
  Synthetic
cagtgtcccutgtttgaagtucct

SEQ ID NO: 101065 - DNA, 21 bp, Artificial Sequence
  Synthetic
ggccccaacauaccctttcug

SEQ ID NO: 101066 - DNA, 23 bp, Artificial Sequence
  Synthetic
acagcctcuccccataattccut

SEQ ID NO: 101067 - DNA, 19 bp, Artificial Sequence
  Synthetic
gccaaugugcagaccacct

SEQ ID NO: 101068 - DNA, 22 bp, Artificial Sequence
  Synthetic
acaaggaacuggtgucaaagca

SEQ ID NO: 101069 - DNA, 28 bp, Artificial Sequence
  Synthetic
gggattcctaaagutggtgtcttaaugg

SEQ ID NO: 101070 - DNA, 26 bp, Artificial Sequence
  Synthetic
tcgatacagcagcaguatgtcaauat

SEQ ID NO: 101071 - DNA, 24 bp, Artificial Sequence
  Synthetic
tccagcagcugtgaaattgactua

SEQ ID NO: 101072 - DNA, 22 bp, Artificial Sequence
  Synthetic
tgttggtgucacacagcctaut

SEQ ID NO: 101073 - DNA, 29 bp, Artificial Sequence
  Synthetic
tgatggatgcccaauacaagataatuaca

SEQ ID NO: 101074 - DNA, 27 bp, Artificial Sequence
  Synthetic
agctgtcatucatattccaaacugact

SEQ ID NO: 101075 - DNA, 26 bp, Artificial Sequence
  Synthetic
ttgatggtggutttcttttgttugct

SEQ ID NO: 101076 - DNA, 25 bp, Artificial Sequence
  Synthetic
tgcacgttttguttaagtttcgcut

SEQ ID NO: 101077 - DNA, 23 bp, Artificial Sequence
  Synthetic
tggtttcactuttgcaggcaaug

SEQ ID NO: 101078 - DNA, 28 bp, Artificial Sequence
  Synthetic
tcatacctgtaaguttactgcatctugg

SEQ ID NO: 101079 - DNA, 21 bp, Artificial Sequence
  Synthetic
aacgccagcagutaccuaaca

SEQ ID NO: 101080 - DNA, 22 bp, Artificial Sequence
  Synthetic
ggttaacccauctgacgtucaa

SEQ ID NO: 101081 - DNA, 26 bp, Artificial Sequence
  Synthetic
tctctgcctauatcagtgctgaugat

SEQ ID NO: 101082 - DNA, 24 bp, Artificial Sequence
  Synthetic
tttggtaatgaggugtgctgtcut

SEQ ID NO: 101083 - DNA, 29 bp, Artificial Sequence
  Synthetic
cggaagttaagaggaaaugtgtcatguat

SEQ ID NO: 101084 - DNA, 26 bp, Artificial Sequence
  Synthetic
caaattagcatucagcagttgucagt

SEQ ID NO: 101085 - DNA, 21 bp, Artificial Sequence
  Synthetic
ctgcaaagcaugtggttcugg

SEQ ID NO: 101086 - DNA, 21 bp, Artificial Sequence
  Synthetic
cctggcuaaactgctugcaga

SEQ ID NO: 101087 - DNA, 24 bp, Artificial Sequence
  Synthetic
gctcattguggttgtccttttucc

SEQ ID NO: 101088 - DNA, 23 bp, Artificial Sequence
  Synthetic
cattcagacugagagcacucaca

SEQ ID NO: 101089 - DNA, 23 bp, Artificial Sequence
  Synthetic
gactctccauggtttctcucagg

SEQ ID NO: 101090 - DNA, 22 bp, Artificial Sequence
  Synthetic
gugtgttagaacuggcccagat

SEQ ID NO: 101091 - DNA, 28 bp, Artificial Sequence
  Synthetic
cctccaagattutgatccacttttucaa

SEQ ID NO: 101092 - DNA, 27 bp, Artificial Sequence
  Synthetic
ctctacgcgutcattaagaauggagat

SEQ ID NO: 101093 - DNA, 26 bp, Artificial Sequence
  Synthetic
gtccgtggguattcaagtttgtttut

SEQ ID NO: 101094 - DNA, 21 bp, Artificial Sequence
  Synthetic
agcctgccuagagtcucagaa

SEQ ID NO: 101095 - DNA, 28 bp, Artificial Sequence
  Synthetic
gttggtctucaaaaatttacctctugct

SEQ ID NO: 101096 - DNA, 21 bp, Artificial Sequence
  Synthetic
agcgtuccaggatccaugaag

SEQ ID NO: 101097 - DNA, 21 bp, Artificial Sequence
  Synthetic
tctgugccgagaaattgcuca

SEQ ID NO: 101098 - DNA, 21 bp, Artificial Sequence
  Synthetic
tctgtccugaatggcctucac

SEQ ID NO: 101099 - DNA, 25 bp, Artificial Sequence
  Synthetic
gccaccagaaccuacttagaaugac

SEQ ID NO: 101100 - DNA, 21 bp, Artificial Sequence
  Synthetic
gcagcuccggagtttctctut

SEQ ID NO: 101101 - DNA, 26 bp, Artificial Sequence
  Synthetic
agagagtctcutgataagcttuccca

SEQ ID NO: 101102 - DNA, 23 bp, Artificial Sequence
  Synthetic
catagaggaaaagugccggtuct

SEQ ID NO: 101103 - DNA, 20 bp, Artificial Sequence
  Synthetic
ccgtgggtuagttccaccug

SEQ ID NO: 101104 - DNA, 28 bp, Artificial Sequence
  Synthetic
cttttgccugcaaccatatttcttuagt

SEQ ID NO: 101105 - DNA, 28 bp, Artificial Sequence
  Synthetic
catgttctcaaugttctttcccattuct

SEQ ID NO: 101106 - DNA, 21 bp, Artificial Sequence
  Synthetic
cgtggccutcttcacucagaa

SEQ ID NO: 101107 - DNA, 22 bp, Artificial Sequence
  Synthetic
gctatgagccugtgtctggtua

SEQ ID NO: 101108 - DNA, 25 bp, Artificial Sequence
  Synthetic
gggtttucatgtaaatcuggacagt

SEQ ID NO: 101109 - DNA, 22 bp, Artificial Sequence
  Synthetic
cgtgctacaaaucagcagucag

SEQ ID NO: 101110 - DNA, 25 bp, Artificial Sequence
  Synthetic
gctcagcugaagatagtgacttuga

SEQ ID NO: 101111 - DNA, 22 bp, Artificial Sequence
  Synthetic
tctgugaagccaagatccucac

SEQ ID NO: 101112 - DNA, 28 bp, Artificial Sequence
  Synthetic
tcttatcactacgcutactttccacauc

SEQ ID NO: 101113 - DNA, 27 bp, Artificial Sequence
  Synthetic
ccaactccuggaaaactaaugagacat

SEQ ID NO: 101114 - DNA, 27 bp, Artificial Sequence
  Synthetic
tgagcgaaatagutacagtgacttucc

SEQ ID NO: 101115 - DNA, 22 bp, Artificial Sequence
  Synthetic
gctgutcgaaagcuccacaaac

SEQ ID NO: 101116 - DNA, 22 bp, Artificial Sequence
  Synthetic
tcugcagttugagggacaagac

SEQ ID NO: 101117 - DNA, 28 bp, Artificial Sequence
  Synthetic
aaatagcaautgcatcaaugagaaccaa

SEQ ID NO: 101118 - DNA, 23 bp, Artificial Sequence
  Synthetic
cccggcaaautgtccttaactut

SEQ ID NO: 101119 - DNA, 22 bp, Artificial Sequence
  Synthetic
acgccactuggtcatcatcauc

SEQ ID NO: 101120 - DNA, 22 bp, Artificial Sequence
  Synthetic
ctgtcctgacucaccttccaut

SEQ ID NO: 101121 - DNA, 21 bp, Artificial Sequence
  Synthetic
cccacttuccccttccatguc

SEQ ID NO: 101122 - DNA, 17 bp, Artificial Sequence
  Synthetic
ggtcccaugcctcugct

SEQ ID NO: 101123 - DNA, 19 bp, Artificial Sequence
  Synthetic
agcctcaccugcctcatug

SEQ ID NO: 101124 - DNA, 17 bp, Artificial Sequence
  Synthetic
gaggcgcaggucctuct

SEQ ID NO: 101125 - DNA, 18 bp, Artificial Sequence
  Synthetic
cccggcugcctucaaaca

SEQ ID NO: 101126 - DNA, 27 bp, Artificial Sequence
  Synthetic
ttggttttgttagugatctgtgcaaug

SEQ ID NO: 101127 - DNA, 26 bp, Artificial Sequence
  Synthetic
ctcctggcatutaaccaaccagauat

SEQ ID NO: 101128 - DNA, 21 bp, Artificial Sequence
  Synthetic
ggcucgaaaggaatggaucct

SEQ ID NO: 101129 - DNA, 23 bp, Artificial Sequence
  Synthetic
agacactccucaacccttcctua

SEQ ID NO: 101130 - DNA, 23 bp, Artificial Sequence
  Synthetic
agaaagctaucaaccccttgcug

SEQ ID NO: 101131 - DNA, 21 bp, Artificial Sequence
  Synthetic
ttttccuttccccugcacgat

SEQ ID NO: 101132 - DNA, 27 bp, Artificial Sequence
  Synthetic
tgatgggtaaagagaaugaggagacut

SEQ ID NO: 101133 - DNA, 27 bp, Artificial Sequence
  Synthetic
aaatggtggagacucagatcaattcug

SEQ ID NO: 101134 - DNA, 24 bp, Artificial Sequence
  Synthetic
tcgtttccugaacccaacattuca

SEQ ID NO: 101135 - DNA, 28 bp, Artificial Sequence
  Synthetic
tcctttcactucacttctgttttauccc

SEQ ID NO: 101136 - DNA, 26 bp, Artificial Sequence
  Synthetic
gcagaccagauataggtcaaccuaag

SEQ ID NO: 101137 - DNA, 21 bp, Artificial Sequence
  Synthetic
acccccugttcatugcaaaca

SEQ ID NO: 101138 - DNA, 28 bp, Artificial Sequence
  Synthetic
tgtctcttcacauttcgcaatcatuaga

SEQ ID NO: 101139 - DNA, 21 bp, Artificial Sequence
  Synthetic
guaaacggaaggugaccacca

SEQ ID NO: 101140 - DNA, 25 bp, Artificial Sequence
  Synthetic
gccttcttagcauttccttggauct

SEQ ID NO: 101141 - DNA, 23 bp, Artificial Sequence
  Synthetic
tgctggcugttaacucacaaaca

SEQ ID NO: 101142 - DNA, 23 bp, Artificial Sequence
  Synthetic
agcccugaagaaaggacucagat

SEQ ID NO: 101143 - DNA, 27 bp, Artificial Sequence
  Synthetic
gaagtggttttugtggaagatgucaag

SEQ ID NO: 101144 - DNA, 23 bp, Artificial Sequence
  Synthetic
caaacctugccaacaggaacaut

SEQ ID NO: 101145 - DNA, 30 bp, Artificial Sequence
  Synthetic
tggtacttaccautttgttgttgtcuaaga

SEQ ID NO: 101146 - DNA, 24 bp, Artificial Sequence
  Synthetic
cttgaagcctutgaccttttggut

SEQ ID NO: 101147 - DNA, 21 bp, Artificial Sequence
  Synthetic
gaaacttgucgtgcctgtugg

SEQ ID NO: 101148 - DNA, 21 bp, Artificial Sequence
  Synthetic
gaaaccagcugcacatgcuaa

SEQ ID NO: 101149 - DNA, 26 bp, Artificial Sequence
  Synthetic
cctgatttaggcuttgaactguccat

SEQ ID NO: 101150 - DNA, 20 bp, Artificial Sequence
  Synthetic
ccggctguaactcggaugaa

SEQ ID NO: 101151 - DNA, 20 bp, Artificial Sequence
  Synthetic
caucagcagcttgucgaacc

SEQ ID NO: 101152 - DNA, 22 bp, Artificial Sequence
  Synthetic
cactagtgtugggtctcaugct

SEQ ID NO: 101153 - DNA, 21 bp, Artificial Sequence
  Synthetic
caagcctucgaggaggttuca

SEQ ID NO: 101154 - DNA, 21 bp, Artificial Sequence
  Synthetic
ccttcggtgutccaccagtut

SEQ ID NO: 101155 - DNA, 28 bp, Artificial Sequence
  Synthetic
cctgcaggattguaggttacttagaaut

SEQ ID NO: 101156 - DNA, 28 bp, Artificial Sequence
  Synthetic
caagtagcacaaauttgcttttggcuaa

SEQ ID NO: 101157 - DNA, 25 bp, Artificial Sequence
  Synthetic
agaatacugaggagatgacgugaca

SEQ ID NO: 101158 - DNA, 26 bp, Artificial Sequence
  Synthetic
ggatttttguacgagaacaugagcaa

SEQ ID NO: 101159 - DNA, 22 bp, Artificial Sequence
  Synthetic
gaagcucauggaagacccagac

SEQ ID NO: 101160 - DNA, 28 bp, Artificial Sequence
  Synthetic
ttttgcacaatuagaatgtcacgtcauc

SEQ ID NO: 101161 - DNA, 27 bp, Artificial Sequence
  Synthetic
gcacccttgtcutctcatgttatttut

SEQ ID NO: 101162 - DNA, 25 bp, Artificial Sequence
  Synthetic
ctcacggagucagttccaatatuca

SEQ ID NO: 101163 - DNA, 24 bp, Artificial Sequence
  Synthetic
ctaactgucagaacagctctgguc

SEQ ID NO: 101164 - DNA, 21 bp, Artificial Sequence
  Synthetic
cccaaguccgaactcaagcug

SEQ ID NO: 101165 - DNA, 24 bp, Artificial Sequence
  Synthetic
cataagggucagagtgauccacaa

SEQ ID NO: 101166 - DNA, 23 bp, Artificial Sequence
  Synthetic
ggagagaagaagggucagcauct

SEQ ID NO: 101167 - DNA, 26 bp, Artificial Sequence
  Synthetic
gaatttgcctauacttccaggtgcua

SEQ ID NO: 101168 - DNA, 27 bp, Artificial Sequence
  Synthetic
caacataggcaccauctactttuagca

SEQ ID NO: 101169 - DNA, 30 bp, Artificial Sequence
  Synthetic
tgatcattgaagaaacauacaaagaatugg

SEQ ID NO: 101170 - DNA, 23 bp, Artificial Sequence
  Synthetic
tgataacacagccutaccuggga

SEQ ID NO: 101171 - DNA, 21 bp, Artificial Sequence
  Synthetic
gctgcctutgtttgccuacag

SEQ ID NO: 101172 - DNA, 24 bp, Artificial Sequence
  Synthetic
cctgctagtguagtccttccacut

SEQ ID NO: 101173 - DNA, 24 bp, Artificial Sequence
  Synthetic
aaaggutacagctcaucgaggaac

SEQ ID NO: 101174 - DNA, 22 bp, Artificial Sequence
  Synthetic
aggactggcugtttttcggtua

SEQ ID NO: 101175 - DNA, 25 bp, Artificial Sequence
  Synthetic
ctcctcacgacaacautctgtttug

SEQ ID NO: 101176 - DNA, 21 bp, Artificial Sequence
  Synthetic
gcacugggagttucacacaga

SEQ ID NO: 101177 - DNA, 27 bp, Artificial Sequence
  Synthetic
gtggcttcucacagggattauaaaaac

SEQ ID NO: 101178 - DNA, 19 bp, Artificial Sequence
  Synthetic
ctgaaggtcuggcggtgut

SEQ ID NO: 101179 - DNA, 28 bp, Artificial Sequence
  Synthetic
gccaaatatagcaugtcagtgttttuga

SEQ ID NO: 101180 - DNA, 19 bp, Artificial Sequence
  Synthetic
cugaggcaaagctcugggt

SEQ ID NO: 101181 - DNA, 17 bp, Artificial Sequence
  Synthetic
gccccugtccccucaag

SEQ ID NO: 101182 - DNA, 17 bp, Artificial Sequence
  Synthetic
ggagcugccaggtggua

SEQ ID NO: 101183 - DNA, 19 bp, Artificial Sequence
  Synthetic
ccacacguccagctgtcuc

SEQ ID NO: 101184 - DNA, 18 bp, Artificial Sequence
  Synthetic
ggtgtccucgagcctuga

SEQ ID NO: 101185 - DNA, 19 bp, Artificial Sequence
  Synthetic
cctccucgggtacccaucc

SEQ ID NO: 101186 - DNA, 18 bp, Artificial Sequence
  Synthetic
ggagacagcuggacgugt

SEQ ID NO: 101187 - DNA, 21 bp, Artificial Sequence
  Synthetic
gagatctuccaggcgcuacag

SEQ ID NO: 101188 - DNA, 20 bp, Artificial Sequence
  Synthetic
cagttgccucatgcacucct

SEQ ID NO: 101189 - DNA, 21 bp, Artificial Sequence
  Synthetic
cagaccaacuacgcctttgug

SEQ ID NO: 101190 - DNA, 19 bp, Artificial Sequence
  Synthetic
gcgggaggaacaggutguc

SEQ ID NO: 101191 - DNA, 22 bp, Artificial Sequence
  Synthetic
agauctgctccaucaacagcac

SEQ ID NO: 101192 - DNA, 20 bp, Artificial Sequence
  Synthetic
tcaggcacaaaggcguagut

SEQ ID NO: 101193 - DNA, 17 bp, Artificial Sequence
  Synthetic
cgcccgccuaugacgac

SEQ ID NO: 101194 - DNA, 29 bp, Artificial Sequence
  Synthetic
gtaaagtgctauggtcatattgtguagga

SEQ ID NO: 101195 - DNA, 22 bp, Artificial Sequence
  Synthetic
aatuggccaggauggagagaac

SEQ ID NO: 101196 - DNA, 26 bp, Artificial Sequence
  Synthetic
tttactgccauacatctcctttccug

SEQ ID NO: 101197 - DNA, 22 bp, Artificial Sequence
  Synthetic
tctgagcugactggttccucat

SEQ ID NO: 101198 - DNA, 24 bp, Artificial Sequence
  Synthetic
ctgtcttctucttttgacccucca

SEQ ID NO: 101199 - DNA, 21 bp, Artificial Sequence
  Synthetic
aagaacagggcacguttcuga

SEQ ID NO: 101200 - DNA, 28 bp, Artificial Sequence
  Synthetic
aggaagagautcccaaaaatuacagcat

SEQ ID NO: 101201 - DNA, 26 bp, Artificial Sequence
  Synthetic
caaagutcccuagaaaaccagaccaa

SEQ ID NO: 101202 - DNA, 21 bp, Artificial Sequence
  Synthetic
caucttcatguggaggcagca

SEQ ID NO: 101203 - DNA, 26 bp, Artificial Sequence
  Synthetic
ctgtcattcccuaccccaaaauagaa

SEQ ID NO: 101204 - DNA, 22 bp, Artificial Sequence
  Synthetic
gggctccgaguttctggatcua

SEQ ID NO: 101205 - DNA, 19 bp, Artificial Sequence
  Synthetic
gtgttcucacaccggugct

SEQ ID NO: 101206 - DNA, 21 bp, Artificial Sequence
  Synthetic
gctattttggcuggcgaagut

SEQ ID NO: 101207 - DNA, 21 bp, Artificial Sequence
  Synthetic
ggaagugggagctagagcuca

SEQ ID NO: 101208 - DNA, 20 bp, Artificial Sequence
  Synthetic
gcauacacgcaacccctcua

SEQ ID NO: 101209 - DNA, 22 bp, Artificial Sequence
  Synthetic
cgttgttgucaagggugaggag

SEQ ID NO: 101210 - DNA, 21 bp, Artificial Sequence
  Synthetic
tggctctcguccagtatcucc

SEQ ID NO: 101211 - DNA, 28 bp, Artificial Sequence
  Synthetic
tggcttattcgaauggctaagatugaat

SEQ ID NO: 101212 - DNA, 21 bp, Artificial Sequence
  Synthetic
cctgctucaaccacaauggag

SEQ ID NO: 101213 - DNA, 27 bp, Artificial Sequence
  Synthetic
tctggtttactcguctagttgactgua

SEQ ID NO: 101214 - DNA, 25 bp, Artificial Sequence
  Synthetic
gcttaagucagctattucccacgaa

SEQ ID NO: 101215 - DNA, 26 bp, Artificial Sequence
  Synthetic
tggaaatcagcuccttcgacuaaaaa

SEQ ID NO: 101216 - DNA, 21 bp, Artificial Sequence
  Synthetic
tttcttgccagcuaccagugt

SEQ ID NO: 101217 - DNA, 22 bp, Artificial Sequence
  Synthetic
tggacagcucaucacaggagat

SEQ ID NO: 101218 - DNA, 20 bp, Artificial Sequence
  Synthetic
ctatcaaugcgcgacagcuc

SEQ ID NO: 101219 - DNA, 26 bp, Artificial Sequence
  Synthetic
accctaattugaacatcgctactugt

SEQ ID NO: 101220 - DNA, 22 bp, Artificial Sequence
  Synthetic
acaaaggacutgcaagccauct

SEQ ID NO: 101221 - DNA, 22 bp, Artificial Sequence
  Synthetic
gcgataaaccutccagggtuca

SEQ ID NO: 101222 - DNA, 26 bp, Artificial Sequence
  Synthetic
acatattaugcacatggttugaggct

SEQ ID NO: 101223 - DNA, 26 bp, Artificial Sequence
  Synthetic
tcccacatcauctctgtcatagucat

SEQ ID NO: 101224 - DNA, 24 bp, Artificial Sequence
  Synthetic
actgtgtcucaagactgcatucaa

SEQ ID NO: 101225 - DNA, 24 bp, Artificial Sequence
  Synthetic
catgtagccucaaacagatggtuc

SEQ ID NO: 101226 - DNA, 27 bp, Artificial Sequence
  Synthetic
gtgtcttuactgtcttgtuaaccccaa

SEQ ID NO: 101227 - DNA, 20 bp, Artificial Sequence
  Synthetic
catcucccgcacucggaaat

SEQ ID NO: 101228 - DNA, 19 bp, Artificial Sequence
  Synthetic
tccuccccatccucaggaa

SEQ ID NO: 101229 - DNA, 28 bp, Artificial Sequence
  Synthetic
ggtaaacttttcutcacattgcaaguca

SEQ ID NO: 101230 - DNA, 28 bp, Artificial Sequence
  Synthetic
catacacaagcautcaccgataaatucc

SEQ ID NO: 101231 - DNA, 22 bp, Artificial Sequence
  Synthetic
gagcacacugctcagactuact

SEQ ID NO: 101232 - DNA, 24 bp, Artificial Sequence
  Synthetic
ctatccgcuctccttgaagtucag

SEQ ID NO: 101233 - DNA, 28 bp, Artificial Sequence
  Synthetic
cacaatcctttugaaaagatggctugat

SEQ ID NO: 101234 - DNA, 20 bp, Artificial Sequence
  Synthetic
ccatctcuggttgcctucgt

SEQ ID NO: 101235 - DNA, 25 bp, Artificial Sequence
  Synthetic
ctgatatgcttcuctgtggcctuag

SEQ ID NO: 101236 - DNA, 24 bp, Artificial Sequence
  Synthetic
cattccatuacaacccagcucagt

SEQ ID NO: 101237 - DNA, 21 bp, Artificial Sequence
  Synthetic
ctctgaucaggcagcacctua

SEQ ID NO: 101238 - DNA, 24 bp, Artificial Sequence
  Synthetic
ctgggacucagattugaacacact

SEQ ID NO: 101239 - DNA, 28 bp, Artificial Sequence
  Synthetic
gagttcttgautatgaaaccttugccaa

SEQ ID NO: 101240 - DNA, 25 bp, Artificial Sequence
  Synthetic
tctctcctcggutccttaatctcug

SEQ ID NO: 101241 - DNA, 28 bp, Artificial Sequence
  Synthetic
agggaaggataauctttagctgtcaugt

SEQ ID NO: 101242 - DNA, 23 bp, Artificial Sequence
  Synthetic
aggccuccaaagcttctaaacuc

SEQ ID NO: 101243 - DNA, 28 bp, Artificial Sequence
  Synthetic
ccacttgccctuttaccagactttatua

SEQ ID NO: 101244 - DNA, 25 bp, Artificial Sequence
  Synthetic
ccttgttgugaagtgcttugaaaga

SEQ ID NO: 101245 - DNA, 21 bp, Artificial Sequence
  Synthetic
tgaugcaugaaccccaagcat

SEQ ID NO: 101246 - DNA, 31 bp, Artificial Sequence
  Synthetic
attaggcttttgucattagaaaaguagagct

SEQ ID NO: 101247 - DNA, 28 bp, Artificial Sequence
  Synthetic
cagcattggttuatgatcagtcttucaa

SEQ ID NO: 101248 - DNA, 24 bp, Artificial Sequence
  Synthetic
catgaucccagttcaaauaacgct

SEQ ID NO: 101249 - DNA, 24 bp, Artificial Sequence
  Synthetic
aatcttcuggaagcaauccacgat

SEQ ID NO: 101250 - DNA, 27 bp, Artificial Sequence
  Synthetic
cggattcatacuattccaactgtucct

SEQ ID NO: 101251 - DNA, 22 bp, Artificial Sequence
  Synthetic
cctggccucattcttcaagugt

SEQ ID NO: 101252 - DNA, 25 bp, Artificial Sequence
  Synthetic
tctucacaaaagagccacaaaucct

SEQ ID NO: 101253 - DNA, 21 bp, Artificial Sequence
  Synthetic
tctgguctggcucacagagat

SEQ ID NO: 101254 - DNA, 27 bp, Artificial Sequence
  Synthetic
tgttcaatattagugagctgcagaucc

SEQ ID NO: 101255 - DNA, 23 bp, Artificial Sequence
  Synthetic
aattcgctgugccatctccauat

SEQ ID NO: 101256 - DNA, 25 bp, Artificial Sequence
  Synthetic
agttcacaacuggaaatgagtccut

SEQ ID NO: 101257 - DNA, 19 bp, Artificial Sequence
  Synthetic
cagcttgcugttgcggtuc

SEQ ID NO: 101258 - DNA, 23 bp, Artificial Sequence
  Synthetic
ccaccacauccaugacaacaaca

SEQ ID NO: 101259 - DNA, 24 bp, Artificial Sequence
  Synthetic
gtgtatggcgaauttggcgauaat

SEQ ID NO: 101260 - DNA, 22 bp, Artificial Sequence
  Synthetic
ccucagacagaggcaguagaac

SEQ ID NO: 101261 - DNA, 26 bp, Artificial Sequence
  Synthetic
ggtaaattgtcacutgaccaagcaut

SEQ ID NO: 101262 - DNA, 20 bp, Artificial Sequence
  Synthetic
agtacagcggacacutgcuc

SEQ ID NO: 101263 - DNA, 21 bp, Artificial Sequence
  Synthetic
gccaagugcaccatgugagat

SEQ ID NO: 101264 - DNA, 27 bp, Artificial Sequence
  Synthetic
gtcactctaucccaagattgtttuacc

SEQ ID NO: 101265 - DNA, 23 bp, Artificial Sequence
  Synthetic
gccatactgutgctgttttucct

SEQ ID NO: 101266 - DNA, 22 bp, Artificial Sequence
  Synthetic
tutggctgaugaaaggcagact

SEQ ID NO: 101267 - DNA, 28 bp, Artificial Sequence
  Synthetic
caaagcatctgagautgaatacaagcug

SEQ ID NO: 101268 - DNA, 19 bp, Artificial Sequence
  Synthetic
accggtcgutgaccttucc

SEQ ID NO: 101269 - DNA, 28 bp, Artificial Sequence
  Synthetic
gctttctgaccuctgtgattgctattua

SEQ ID NO: 101270 - DNA, 25 bp, Artificial Sequence
  Synthetic
ctctgcatgcauctgtcaatgagua

SEQ ID NO: 101271 - DNA, 28 bp, Artificial Sequence
  Synthetic
aattctcagataaaugcaaagcacugac

SEQ ID NO: 101272 - DNA, 24 bp, Artificial Sequence
  Synthetic
tcctggtattcugctatccacugt

SEQ ID NO: 101273 - DNA, 29 bp, Artificial Sequence
  Synthetic
cagagaggtuaagaaaggagattcaugat

SEQ ID NO: 101274 - DNA, 23 bp, Artificial Sequence
  Synthetic
agttccttcaacugctccatgug

SEQ ID NO: 101275 - DNA, 27 bp, Artificial Sequence
  Synthetic
tttgctcctacucactctcttttucag

SEQ ID NO: 101276 - DNA, 28 bp, Artificial Sequence
  Synthetic
gcaatgagaagtutaagaagatgcacut

SEQ ID NO: 101277 - DNA, 26 bp, Artificial Sequence
  Synthetic
tccctttgttuttcatgtcaguccat

SEQ ID NO: 101278 - DNA, 23 bp, Artificial Sequence
  Synthetic
gtactaaccggugatcctctgug

SEQ ID NO: 101279 - DNA, 28 bp, Artificial Sequence
  Synthetic
caggttctaaacugactacctacctcut

SEQ ID NO: 101280 - DNA, 26 bp, Artificial Sequence
  Synthetic
cagtatutggcctgtugaagaagaat

SEQ ID NO: 101281 - DNA, 18 bp, Artificial Sequence
  Synthetic
cccaggcagagcugctuc

SEQ ID NO: 101282 - DNA, 24 bp, Artificial Sequence
  Synthetic
tgttcugacggaggataugggaaa

SEQ ID NO: 101283 - DNA, 21 bp, Artificial Sequence
  Synthetic
ctttttcagaggugggcgaug

SEQ ID NO: 101284 - DNA, 20 bp, Artificial Sequence
  Synthetic
cagaactuggagccguggaa

SEQ ID NO: 101285 - DNA, 21 bp, Artificial Sequence
  Synthetic
tctccutgcttcucgaaggga

SEQ ID NO: 101286 - DNA, 18 bp, Artificial Sequence
  Synthetic
guggaagcagctcugcct

SEQ ID NO: 101287 - DNA, 24 bp, Artificial Sequence
  Synthetic
gtccttttcuccttgcttcucgaa

SEQ ID NO: 101288 - DNA, 20 bp, Artificial Sequence
  Synthetic
ccatcaaacuccggcagtuc

SEQ ID NO: 101289 - DNA, 27 bp, Artificial Sequence
  Synthetic
accagaattcaatuataccttggccut

SEQ ID NO: 101290 - DNA, 17 bp, Artificial Sequence
  Synthetic
ccgtgccuccctucgag

SEQ ID NO: 101291 - DNA, 21 bp, Artificial Sequence
  Synthetic
tgttaugccccacgtgatugt

SEQ ID NO: 101292 - DNA, 21 bp, Artificial Sequence
  Synthetic
accttggugtgtggtgucaag

SEQ ID NO: 101293 - DNA, 26 bp, Artificial Sequence
  Synthetic
aacugagcttcuggaaaagagaaagt

SEQ ID NO: 101294 - DNA, 26 bp, Artificial Sequence
  Synthetic
actggauacttgtctguaggaaaggt

SEQ ID NO: 101295 - DNA, 28 bp, Artificial Sequence
  Synthetic
cgactcttctucagagatgattcctuct

SEQ ID NO: 101296 - DNA, 20 bp, Artificial Sequence
  Synthetic
ctcccccuccaaggagagua

SEQ ID NO: 101297 - DNA, 24 bp, Artificial Sequence
  Synthetic
tcttcuaaacaccaagccccttut

SEQ ID NO: 101298 - DNA, 28 bp, Artificial Sequence
  Synthetic
tggatggattacuttagtcctgagaugt

SEQ ID NO: 101299 - DNA, 21 bp, Artificial Sequence
  Synthetic
ttgaatccuccgccgttctut

SEQ ID NO: 101300 - DNA, 18 bp, Artificial Sequence
  Synthetic
cccatgtuccggcgugat

SEQ ID NO: 101301 - DNA, 23 bp, Artificial Sequence
  Synthetic
cttgaugacgactucagacaggt

SEQ ID NO: 101302 - DNA, 21 bp, Artificial Sequence
  Synthetic
caacaucgggaagagaugcga

SEQ ID NO: 101303 - DNA, 24 bp, Artificial Sequence
  Synthetic
ccgutagctgtaaucacaccacat

SEQ ID NO: 101304 - DNA, 21 bp, Artificial Sequence
  Synthetic
cagugtcaccaucgagcagag

SEQ ID NO: 101305 - DNA, 21 bp, Artificial Sequence
  Synthetic
acaggcgcutggttttacuga

SEQ ID NO: 101306 - DNA, 22 bp, Artificial Sequence
  Synthetic
ctgaagtcgucatcaaguggga

SEQ ID NO: 101307 - DNA, 22 bp, Artificial Sequence
  Synthetic
ctccacuggaatttggguccat

SEQ ID NO: 101308 - DNA, 19 bp, Artificial Sequence
  Synthetic
gggtcugcagggactcugt

SEQ ID NO: 101309 - DNA, 20 bp, Artificial Sequence
  Synthetic
caatctgcugttggcuaccc

SEQ ID NO: 101310 - DNA, 19 bp, Artificial Sequence
  Synthetic
gugggcccaagagccauaa

SEQ ID NO: 101311 - DNA, 19 bp, Artificial Sequence
  Synthetic
gcattgguggccttcucgt

SEQ ID NO: 101312 - DNA, 20 bp, Artificial Sequence
  Synthetic
cccaaaguccccgatctuga

SEQ ID NO: 101313 - DNA, 19 bp, Artificial Sequence
  Synthetic
ccggcuacguaagcaccag

SEQ ID NO: 101314 - DNA, 23 bp, Artificial Sequence
  Synthetic
catctaugaagggcucaccaact

SEQ ID NO: 101315 - DNA, 21 bp, Artificial Sequence
  Synthetic
cucaaagctcugcccaacaac

SEQ ID NO: 101316 - DNA, 17 bp, Artificial Sequence
  Synthetic
gcguagcggcucagagt

SEQ ID NO: 101317 - DNA, 19 bp, Artificial Sequence
  Synthetic
cagggtccuccagctcaut

SEQ ID NO: 101318 - DNA, 26 bp, Artificial Sequence
  Synthetic
tctgtaaatgaaaugcaaccctgcua

SEQ ID NO: 101319 - DNA, 25 bp, Artificial Sequence
  Synthetic
ggtttgcutcttatgcuggagaaca

SEQ ID NO: 101320 - DNA, 28 bp, Artificial Sequence
  Synthetic
gggacaatttcauttttccttctgucaa

SEQ ID NO: 101321 - DNA, 26 bp, Artificial Sequence
  Synthetic
tggtggcagutgaaagacattuaagt

SEQ ID NO: 101322 - DNA, 24 bp, Artificial Sequence
  Synthetic
gcctaaatgacaugtgctttggut

SEQ ID NO: 101323 - DNA, 19 bp, Artificial Sequence
  Synthetic
guactucaggacgcagggt

SEQ ID NO: 101324 - DNA, 20 bp, Artificial Sequence
  Synthetic
gctttguggaagccatgucc

SEQ ID NO: 101325 - DNA, 24 bp, Artificial Sequence
  Synthetic
gttgtttgctucggcttaatcuga

SEQ ID NO: 101326 - DNA, 24 bp, Artificial Sequence
  Synthetic
ggctttugaaaagggtctgaguct

SEQ ID NO: 101327 - DNA, 28 bp, Artificial Sequence
  Synthetic
cagggaagagguaattaacaaacugagg

SEQ ID NO: 101328 - DNA, 21 bp, Artificial Sequence
  Synthetic
tgttgcgatuctccctgctut

SEQ ID NO: 101329 - DNA, 27 bp, Artificial Sequence
  Synthetic
gttcaagccaauacaccaaagaaucac

SEQ ID NO: 101330 - DNA, 27 bp, Artificial Sequence
  Synthetic
aatactaagtttucagacttgccugct

SEQ ID NO: 101331 - DNA, 26 bp, Artificial Sequence
  Synthetic
tgaugagccatuagaaagaaccacaa

SEQ ID NO: 101332 - DNA, 21 bp, Artificial Sequence
  Synthetic
caccattggcaugggagcuat

SEQ ID NO: 101333 - DNA, 26 bp, Artificial Sequence
  Synthetic
aaaatttuaggagcaagcagtgtucc

SEQ ID NO: 101334 - DNA, 27 bp, Artificial Sequence
  Synthetic
cccttctgtagutatcaggtgaguagt

SEQ ID NO: 101335 - DNA, 25 bp, Artificial Sequence
  Synthetic
cagttggaugagagatggagagaut

SEQ ID NO: 101336 - DNA, 28 bp, Artificial Sequence
  Synthetic
accaaccttttgutaatgatctgtggua

SEQ ID NO: 101337 - DNA, 27 bp, Artificial Sequence
  Synthetic
agcaaactttugcaattgaaggaauca

SEQ ID NO: 101338 - DNA, 27 bp, Artificial Sequence
  Synthetic
tctctttaactgaautgctctgcauga

SEQ ID NO: 101339 - DNA, 23 bp, Artificial Sequence
  Synthetic
gcatcucgagacatacugaggga

SEQ ID NO: 101340 - DNA, 27 bp, Artificial Sequence
  Synthetic
cctcctgauttgtatgauaccaacaca

SEQ ID NO: 101341 - DNA, 26 bp, Artificial Sequence
  Synthetic
cacttgcaggcacaauaacaatctua

SEQ ID NO: 101342 - DNA, 25 bp, Artificial Sequence
  Synthetic
catcttuggaggctacugagaacaa

SEQ ID NO: 101343 - DNA, 27 bp, Artificial Sequence
  Synthetic
cctgttaggaugagatccgtaatguct

SEQ ID NO: 101344 - DNA, 24 bp, Artificial Sequence
  Synthetic
gcctcacucagaactgtctgttua

SEQ ID NO: 101345 - DNA, 23 bp, Artificial Sequence
  Synthetic
cugagaaugaagcccaaaagcag

SEQ ID NO: 101346 - DNA, 25 bp, Artificial Sequence
  Synthetic
tggataatttugccagctcatcucc

SEQ ID NO: 101347 - DNA, 28 bp, Artificial Sequence
  Synthetic
actgtgttcaucaaaagtgttctcucat

SEQ ID NO: 101348 - DNA, 20 bp, Artificial Sequence
  Synthetic
gtgcgguggaaatgccuaag

SEQ ID NO: 101349 - DNA, 22 bp, Artificial Sequence
  Synthetic
ggagauggcagaaaagctucgt

SEQ ID NO: 101350 - DNA, 25 bp, Artificial Sequence
  Synthetic
ggtaggacacutcaaccaaccatut

SEQ ID NO: 101351 - DNA, 28 bp, Artificial Sequence
  Synthetic
caacctgaaatugacactcctcaguaat

SEQ ID NO: 101352 - DNA, 28 bp, Artificial Sequence
  Synthetic
gtgagtttgatuagcttaaaacggctut

SEQ ID NO: 101353 - DNA, 21 bp, Artificial Sequence
  Synthetic
agcagggugatgaacctgtug

SEQ ID NO: 101354 - DNA, 19 bp, Artificial Sequence
  Synthetic
cagacctcugcgggatgug

SEQ ID NO: 101355 - DNA, 21 bp, Artificial Sequence
  Synthetic
ctacctugatggccuggaact

SEQ ID NO: 101356 - DNA, 21 bp, Artificial Sequence
  Synthetic
ccaaccccaacaggutcauca

SEQ ID NO: 101357 - DNA, 23 bp, Artificial Sequence
  Synthetic
ggaaccgugtctcgatuaaaccc

SEQ ID NO: 101358 - DNA, 20 bp, Artificial Sequence
  Synthetic
cgaatcacuccctgccatug

SEQ ID NO: 101359 - DNA, 26 bp, Artificial Sequence
  Synthetic
gtatacattggcugattgcgtaacug

SEQ ID NO: 101360 - DNA, 22 bp, Artificial Sequence
  Synthetic
aagttcagugggtaaccagucc

SEQ ID NO: 101361 - DNA, 25 bp, Artificial Sequence
  Synthetic
gccaautttctcugaaccagaccat

SEQ ID NO: 101362 - DNA, 20 bp, Artificial Sequence
  Synthetic
tggaaggcaucgtcgaucag

SEQ ID NO: 101363 - DNA, 24 bp, Artificial Sequence
  Synthetic
gcaacuaaagcucaagggaagaga

SEQ ID NO: 101364 - DNA, 23 bp, Artificial Sequence
  Synthetic
tgatggaaagugtgtgugcagaa

SEQ ID NO: 101365 - DNA, 18 bp, Artificial Sequence
  Synthetic
gtgtgaucggtggccuga

SEQ ID NO: 101366 - DNA, 19 bp, Artificial Sequence
  Synthetic
cagtucaggccaccgauca

SEQ ID NO: 101367 - DNA, 27 bp, Artificial Sequence
  Synthetic
gaaaacagtatgugttcagccaactut

SEQ ID NO: 101368 - DNA, 22 bp, Artificial Sequence
  Synthetic
aaagguaggcgcctctgtuaaa

SEQ ID NO: 101369 - DNA, 23 bp, Artificial Sequence
  Synthetic
caggtctgutaacgggatuccag

SEQ ID NO: 101370 - DNA, 23 bp, Artificial Sequence
  Synthetic
gtcctctaautgatcagguggca

SEQ ID NO: 101371 - DNA, 24 bp, Artificial Sequence
  Synthetic
gcttctuagccctctgugaaacat

SEQ ID NO: 101372 - DNA, 19 bp, Artificial Sequence
  Synthetic
catatcaggcugccgccua

SEQ ID NO: 101373 - DNA, 28 bp, Artificial Sequence
  Synthetic
tgtacacgtgguttgttaatgttttgut

SEQ ID NO: 101374 - DNA, 26 bp, Artificial Sequence
  Synthetic
aggatgtcuaggaacatgauggagaa

SEQ ID NO: 101375 - DNA, 23 bp, Artificial Sequence
  Synthetic
gguagccaaagacaaauccagca

SEQ ID NO: 101376 - DNA, 21 bp, Artificial Sequence
  Synthetic
caccgaaagggacgaugacua

SEQ ID NO: 101377 - DNA, 25 bp, Artificial Sequence
  Synthetic
tgtggtggaguttacaacttucaca

SEQ ID NO: 101378 - DNA, 23 bp, Artificial Sequence
  Synthetic
aaaagtctctugcttgagggcut

SEQ ID NO: 101379 - DNA, 20 bp, Artificial Sequence
  Synthetic
ggtggcacaccaaugcagua

SEQ ID NO: 101380 - DNA, 20 bp, Artificial Sequence
  Synthetic
cagggatacucgggccttuc

SEQ ID NO: 101381 - DNA, 22 bp, Artificial Sequence
  Synthetic
tgttccagggcuttgcttctua

SEQ ID NO: 101382 - DNA, 18 bp, Artificial Sequence
  Synthetic
gcagaugccgucgacaag

SEQ ID NO: 101383 - DNA, 22 bp, Artificial Sequence
  Synthetic
tgtttugtgcacgugaacaagg

SEQ ID NO: 101384 - DNA, 29 bp, Artificial Sequence
  Synthetic
actcccttuaaagaccttgctatagtuct

SEQ ID NO: 101385 - DNA, 28 bp, Artificial Sequence
  Synthetic
gccacagatgugatggaaatcgaaauat

SEQ ID NO: 101386 - DNA, 25 bp, Artificial Sequence
  Synthetic
gcaaactgauacacaagcaugcaaa

SEQ ID NO: 101387 - DNA, 29 bp, Artificial Sequence
  Synthetic
gcctgtcgacaauatctaatgaatctuga

SEQ ID NO: 101388 - DNA, 26 bp, Artificial Sequence
  Synthetic
atgaatgtcugcagcatctgtagaut

SEQ ID NO: 101389 - DNA, 25 bp, Artificial Sequence
  Synthetic
ttttccccuaatttgtcugagcaca

SEQ ID NO: 101390 - DNA, 23 bp, Artificial Sequence
  Synthetic
cacagaatgcutccatgtggtug

SEQ ID NO: 101391 - DNA, 22 bp, Artificial Sequence
  Synthetic
acccugcugaccaaagagaaag

SEQ ID NO: 101392 - DNA, 20 bp, Artificial Sequence
  Synthetic
gtccatcgucttgcctguct

SEQ ID NO: 101393 - DNA, 25 bp, Artificial Sequence
  Synthetic
catggagtugtcaaaaaccucgaaa

SEQ ID NO: 101394 - DNA, 22 bp, Artificial Sequence
  Synthetic
cagctguaactttggccuggat

SEQ ID NO: 101395 - DNA, 28 bp, Artificial Sequence
  Synthetic
ggagtttttgucagaaagtgaaaaugga

SEQ ID NO: 101396 - DNA, 21 bp, Artificial Sequence
  Synthetic
gccactcaucagggcaaagut

SEQ ID NO: 101397 - DNA, 22 bp, Artificial Sequence
  Synthetic
gatgtgagccgagucttccuac

SEQ ID NO: 101398 - DNA, 28 bp, Artificial Sequence
  Synthetic
caaccattacaaacutaaaaggccauca

SEQ ID NO: 101399 - DNA, 20 bp, Artificial Sequence
  Synthetic
agctuctgcagtucaagcgt

SEQ ID NO: 101400 - DNA, 22 bp, Artificial Sequence
  Synthetic
gtgaggaggccacuttacagut

SEQ ID NO: 101401 - DNA, 22 bp, Artificial Sequence
  Synthetic
ctggtauccgagtcttgugagg

SEQ ID NO: 101402 - DNA, 22 bp, Artificial Sequence
  Synthetic
cctggaaauacttctgcgugct

SEQ ID NO: 101403 - DNA, 23 bp, Artificial Sequence
  Synthetic
gatcacaccaucaccacatguca

SEQ ID NO: 101404 - DNA, 19 bp, Artificial Sequence
  Synthetic
agtgagcguggacugcaag

SEQ ID NO: 101405 - DNA, 28 bp, Artificial Sequence
  Synthetic
aatgaatacaugagtgtgatuccacagt

SEQ ID NO: 101406 - DNA, 20 bp, Artificial Sequence
  Synthetic
gtccccguggtcatcttgut

SEQ ID NO: 101407 - DNA, 20 bp, Artificial Sequence
  Synthetic
gcagcggaccucacactuac

SEQ ID NO: 101408 - DNA, 27 bp, Artificial Sequence
  Synthetic
atcttccuaaaggagaacggaaactug

SEQ ID NO: 101409 - DNA, 23 bp, Artificial Sequence
  Synthetic
tcatcagcaaaggucgcataugt

SEQ ID NO: 101410 - DNA, 20 bp, Artificial Sequence
  Synthetic
tgaggccccacuacagtuca

SEQ ID NO: 101411 - DNA, 23 bp, Artificial Sequence
  Synthetic
tgatgggcaacgucttcuagaac

SEQ ID NO: 101412 - DNA, 26 bp, Artificial Sequence
  Synthetic
accatagaagucgatcaaauccacac

SEQ ID NO: 101413 - DNA, 24 bp, Artificial Sequence
  Synthetic
aatgcatttggcutaccatcauct

SEQ ID NO: 101414 - DNA, 24 bp, Artificial Sequence
  Synthetic
cctacctgtcaucaacttgaccut

SEQ ID NO: 101415 - DNA, 28 bp, Artificial Sequence
  Synthetic
tggaaagttaucagagaaccgatcacua

SEQ ID NO: 101416 - DNA, 24 bp, Artificial Sequence
  Synthetic
ctaatagugtgtcccuggaaccaa

SEQ ID NO: 101417 - DNA, 23 bp, Artificial Sequence
  Synthetic
cacctguggctaatacagaugct

SEQ ID NO: 101418 - DNA, 28 bp, Artificial Sequence
  Synthetic
ggtgttttgtgaautaaaatgcccagua

SEQ ID NO: 101419 - DNA, 28 bp, Artificial Sequence
  Synthetic
ggatcttccaccuattagtagtctugga

SEQ ID NO: 101420 - DNA, 22 bp, Artificial Sequence
  Synthetic
tgggagguacctggtuaacaga

SEQ ID NO: 101421 - DNA, 21 bp, Artificial Sequence
  Synthetic
tgggcuacattttacguggca

SEQ ID NO: 101422 - DNA, 25 bp, Artificial Sequence
  Synthetic
gccatgatgauaacagcagcttuct

SEQ ID NO: 101423 - DNA, 22 bp, Artificial Sequence
  Synthetic
gtaccauctacccaauggccaa

SEQ ID NO: 101424 - DNA, 26 bp, Artificial Sequence
  Synthetic
tggtaccattuccatctcgaagaaua

SEQ ID NO: 101425 - DNA, 33 bp, Artificial Sequence
  Synthetic
ttagcacatttgaauactaggtttcttatuact

SEQ ID NO: 101426 - DNA, 26 bp, Artificial Sequence
  Synthetic
gtttctgcctuacacgatttggatut

SEQ ID NO: 101427 - DNA, 26 bp, Artificial Sequence
  Synthetic
cagcaguacagaaattctuggaacag

SEQ ID NO: 101428 - DNA, 20 bp, Artificial Sequence
  Synthetic
ggcttacccagutggccaut

SEQ ID NO: 101429 - DNA, 24 bp, Artificial Sequence
  Synthetic
gatctcgggaaaccuggagaaaut

SEQ ID NO: 101430 - DNA, 27 bp, Artificial Sequence
  Synthetic
tggaatataggauatgccagcugaaga

SEQ ID NO: 101431 - DNA, 23 bp, Artificial Sequence
  Synthetic
cttttgtgtcaugcaggttguca

SEQ ID NO: 101432 - DNA, 20 bp, Artificial Sequence
  Synthetic
gtggcuaggcctgtuacagt

SEQ ID NO: 101433 - DNA, 22 bp, Artificial Sequence
  Synthetic
cagactuaagcacccaccagut

SEQ ID NO: 101434 - DNA, 22 bp, Artificial Sequence
  Synthetic
gtctttuccagggatggacuca

SEQ ID NO: 101435 - DNA, 24 bp, Artificial Sequence
  Synthetic
tggtgtcuaagaggaaggtgtuca

SEQ ID NO: 101436 - DNA, 23 bp, Artificial Sequence
  Synthetic
ctactgcuggcactaagactuga

SEQ ID NO: 101437 - DNA, 23 bp, Artificial Sequence
  Synthetic
gttctacaggacuggaatgccut

SEQ ID NO: 101438 - DNA, 25 bp, Artificial Sequence
  Synthetic
acaaugggaggaagtaguacaacga

SEQ ID NO: 101439 - DNA, 23 bp, Artificial Sequence
  Synthetic
cgaacucgctgaaauccaagaga

SEQ ID NO: 101440 - DNA, 21 bp, Artificial Sequence
  Synthetic
gcatgctggcugatttccaut

SEQ ID NO: 101441 - DNA, 21 bp, Artificial Sequence
  Synthetic
aaggcagcuacatcctgacug

SEQ ID NO: 101442 - DNA, 28 bp, Artificial Sequence
  Synthetic
ctgcgacccaaacauaatcatagattuc

SEQ ID NO: 101443 - DNA, 28 bp, Artificial Sequence
  Synthetic
gacacttgugggaagcaatatgtttuat

SEQ ID NO: 101444 - DNA, 21 bp, Artificial Sequence
  Synthetic
tgcaaagcaccuggtgguaat

SEQ ID NO: 101445 - DNA, 24 bp, Artificial Sequence
  Synthetic
gtctctttgggutgtaactgctug

SEQ ID NO: 101446 - DNA, 21 bp, Artificial Sequence
  Synthetic
gagagaaggagutgctugcca

SEQ ID NO: 101447 - DNA, 26 bp, Artificial Sequence
  Synthetic
ccttaugggaaggaaacgaugaaaga

SEQ ID NO: 101448 - DNA, 23 bp, Artificial Sequence
  Synthetic
ccagaagcucagttcatucccaa

SEQ ID NO: 101449 - DNA, 28 bp, Artificial Sequence
  Synthetic
cccaccactaugacctctaatacuaaga

SEQ ID NO: 101450 - DNA, 28 bp, Artificial Sequence
  Synthetic
gctctaaatcaugatctggcatatcuga

SEQ ID NO: 101451 - DNA, 21 bp, Artificial Sequence
  Synthetic
acctcgaaucagggaagaucg

SEQ ID NO: 101452 - DNA, 26 bp, Artificial Sequence
  Synthetic
caagcutaactcttgaugacccagaa

SEQ ID NO: 101453 - DNA, 27 bp, Artificial Sequence
  Synthetic
gctttcttcatuttccatgtccaucct

SEQ ID NO: 101454 - DNA, 21 bp, Artificial Sequence
  Synthetic
tgaactggaugctacgcacuc

SEQ ID NO: 101455 - DNA, 22 bp, Artificial Sequence
  Synthetic
gggccggutgtttatgtcuaaa

SEQ ID NO: 101456 - DNA, 22 bp, Artificial Sequence
  Synthetic
gcctagcctugccaacatagut

SEQ ID NO: 101457 - DNA, 27 bp, Artificial Sequence
  Synthetic
gccgggatcagaugaaaaaggtttaua

SEQ ID NO: 101458 - DNA, 20 bp, Artificial Sequence
  Synthetic
cccctaactuccggctccua

SEQ ID NO: 101459 - DNA, 21 bp, Artificial Sequence
  Synthetic
gagagaugugcagcagcagat

SEQ ID NO: 101460 - DNA, 21 bp, Artificial Sequence
  Synthetic
cgcaugctucaggagaacaca

SEQ ID NO: 101461 - DNA, 24 bp, Artificial Sequence
  Synthetic
ctgtagcatgutgctgtcgatuac

SEQ ID NO: 101462 - DNA, 26 bp, Artificial Sequence
  Synthetic
caggaaaugaagatttgcucagcaat

SEQ ID NO: 101463 - DNA, 21 bp, Artificial Sequence
  Synthetic
cagccttcaguatggccctua

SEQ ID NO: 101464 - DNA, 17 bp, Artificial Sequence
  Synthetic
ctcguggcctcggucag

SEQ ID NO: 101465 - DNA, 28 bp, Artificial Sequence
  Synthetic
tgttgatgtcccuacttagctgttuaga

SEQ ID NO: 101466 - DNA, 26 bp, Artificial Sequence
  Synthetic
tttctttacgtuctgctcttttugcc

SEQ ID NO: 101467 - DNA, 22 bp, Artificial Sequence
  Synthetic
acatccaauccgcccaacauac

SEQ ID NO: 101468 - DNA, 33 bp, Artificial Sequence
  Synthetic
gcacttacctcacutagtaatatatttaaugct

SEQ ID NO: 101469 - DNA, 28 bp, Artificial Sequence
  Synthetic
gtggaaaagttuctggcttgatuaaaga

SEQ ID NO: 101470 - DNA, 28 bp, Artificial Sequence
  Synthetic
accaataaggtucatgctcaccaatuat

SEQ ID NO: 101471 - DNA, 25 bp, Artificial Sequence
  Synthetic
tgaacaggagauactggatgcttug

SEQ ID NO: 101472 - DNA, 24 bp, Artificial Sequence
  Synthetic
ctctgttcuaggctctgcttttug

SEQ ID NO: 101473 - DNA, 27 bp, Artificial Sequence
  Synthetic
ttcattgaatcuaccatgttggttcut

SEQ ID NO: 101474 - DNA, 21 bp, Artificial Sequence
  Synthetic
actgcaguctacgtugcaaca

SEQ ID NO: 101475 - DNA, 28 bp, Artificial Sequence
  Synthetic
gctatcttcuaaccattcctcctttuct

SEQ ID NO: 101476 - DNA, 25 bp, Artificial Sequence
  Synthetic
cctttcatgaccugctctttttgut

SEQ ID NO: 101477 - DNA, 23 bp, Artificial Sequence
  Synthetic
tttggguagacatgaagcuggag

SEQ ID NO: 101478 - DNA, 27 bp, Artificial Sequence
  Synthetic
ttatguagaaccgctacttugagaacc

SEQ ID NO: 101479 - DNA, 28 bp, Artificial Sequence
  Synthetic
ggtagaaataacucagcgaaacactuac

SEQ ID NO: 101480 - DNA, 21 bp, Artificial Sequence
  Synthetic
cctggtggucactggaugaag

SEQ ID NO: 101481 - DNA, 29 bp, Artificial Sequence
  Synthetic
tgtgtagatatgguagtgagctctgatut

SEQ ID NO: 101482 - DNA, 28 bp, Artificial Sequence
  Synthetic
ccaaagctgaaaacugtaagtctaguga

SEQ ID NO: 101483 - DNA, 29 bp, Artificial Sequence
  Synthetic
caaccctgatgacuctcctttatatgtut

SEQ ID NO: 101484 - DNA, 28 bp, Artificial Sequence
  Synthetic
gtccatgtaaaacugcaagtgtcatuac

SEQ ID NO: 101485 - DNA, 26 bp, Artificial Sequence
  Synthetic
gtcctttccugaaagatgaactgcua

SEQ ID NO: 101486 - DNA, 19 bp, Artificial Sequence
  Synthetic
tgagtggugcctcctccut

SEQ ID NO: 101487 - DNA, 20 bp, Artificial Sequence
  Synthetic
tgctccaccacgutaagguc

SEQ ID NO: 101488 - DNA, 20 bp, Artificial Sequence
  Synthetic
caatguggcggcttguaaca

SEQ ID NO: 101489 - DNA, 24 bp, Artificial Sequence
  Synthetic
tcatgttgtguttctagacguggt

SEQ ID NO: 101490 - DNA, 20 bp, Artificial Sequence
  Synthetic
cagcccaggcuctucacaat

SEQ ID NO: 101491 - DNA, 20 bp, Artificial Sequence
  Synthetic
ctgaccagucttcgcguaca

SEQ ID NO: 101492 - DNA, 20 bp, Artificial Sequence
  Synthetic
ctgctggucctcauccagat

SEQ ID NO: 101493 - DNA, 23 bp, Artificial Sequence
  Synthetic
gcccaacgcaaacauctctgaua

SEQ ID NO: 101494 - DNA, 23 bp, Artificial Sequence
  Synthetic
catgtacaccaccugagtgctua

SEQ ID NO: 101495 - DNA, 25 bp, Artificial Sequence
  Synthetic
catgcagggcagugaagaattatut

SEQ ID NO: 101496 - DNA, 21 bp, Artificial Sequence
  Synthetic
tggtggtaguggttccacuga

SEQ ID NO: 101497 - DNA, 23 bp, Artificial Sequence
  Synthetic
caacgtagcagagucactgatug

SEQ ID NO: 101498 - DNA, 24 bp, Artificial Sequence
  Synthetic
gactgtctcuctctccttgtcuca

SEQ ID NO: 101499 - DNA, 20 bp, Artificial Sequence
  Synthetic
gagccccaucagttccucac

SEQ ID NO: 101500 - DNA, 22 bp, Artificial Sequence
  Synthetic
gcaauccccattcugacaggaa

SEQ ID NO: 101501 - DNA, 25 bp, Artificial Sequence
  Synthetic
tcuagcaactttatuccacagccaa

SEQ ID NO: 101502 - DNA, 24 bp, Artificial Sequence
  Synthetic
ggaatacacgcutgcatttuccaa

SEQ ID NO: 101503 - DNA, 28 bp, Artificial Sequence
  Synthetic
catccaaaaagaaaaaguaaggcaucct

SEQ ID NO: 101504 - DNA, 25 bp, Artificial Sequence
  Synthetic
gctgtttucccatctgacttugagt

SEQ ID NO: 101505 - DNA, 21 bp, Artificial Sequence
  Synthetic
tcctggatcugctcttccugt

SEQ ID NO: 101506 - DNA, 20 bp, Artificial Sequence
  Synthetic
aagaagcaccgugagcugat

SEQ ID NO: 101507 - DNA, 28 bp, Artificial Sequence
  Synthetic
ccttaatctcagguctctattttgccua

SEQ ID NO: 101508 - DNA, 26 bp, Artificial Sequence
  Synthetic
gggattgcacutaatgtgtaucaact

SEQ ID NO: 101509 - DNA, 24 bp, Artificial Sequence
  Synthetic
tgagacaacautgcgtgatctuca

SEQ ID NO: 101510 - DNA, 27 bp, Artificial Sequence
  Synthetic
tgctgggacaagutgtccttaauaaat

SEQ ID NO: 101511 - DNA, 25 bp, Artificial Sequence
  Synthetic
gccaaatgcuagaaaggaggatcut

SEQ ID NO: 101512 - DNA, 27 bp, Artificial Sequence
  Synthetic
ttgttttaggauaaaggaggcctuacc

SEQ ID NO: 101513 - DNA, 28 bp, Artificial Sequence
  Synthetic
gtatcagagagaccuaaaggcattugaa

SEQ ID NO: 101514 - DNA, 27 bp, Artificial Sequence
  Synthetic
atgaagaauaaagaccctgactuggac

SEQ ID NO: 101515 - DNA, 21 bp, Artificial Sequence
  Synthetic
gccacatcugttgcaggugaa

SEQ ID NO: 101516 - DNA, 22 bp, Artificial Sequence
  Synthetic
cutgttctugccccaaccaaac

SEQ ID NO: 101517 - DNA, 28 bp, Artificial Sequence
  Synthetic
agtgaattacagcacacugatgcttuat

SEQ ID NO: 101518 - DNA, 28 bp, Artificial Sequence
  Synthetic
tttctgtgatgcuttaagttgagggtua

SEQ ID NO: 101519 - DNA, 25 bp, Artificial Sequence
  Synthetic
gagtttgcaggautggttttucagt

SEQ ID NO: 101520 - DNA, 27 bp, Artificial Sequence
  Synthetic
gggaagggatuaatttttcacatgugt

SEQ ID NO: 101521 - DNA, 22 bp, Artificial Sequence
  Synthetic
gcttgagguacaggtuggagag

SEQ ID NO: 101522 - DNA, 23 bp, Artificial Sequence
  Synthetic
ccaattccaauctgtctggcugt

SEQ ID NO: 101523 - DNA, 28 bp, Artificial Sequence
  Synthetic
gggcacagaauctctttgttgaauaaat

SEQ ID NO: 101524 - DNA, 20 bp, Artificial Sequence
  Synthetic
cagaaatgggcuccaacgug

SEQ ID NO: 101525 - DNA, 25 bp, Artificial Sequence
  Synthetic
aaaaacccugaacagaagcacuact

SEQ ID NO: 101526 - DNA, 20 bp, Artificial Sequence
  Synthetic
ggtagccccucagctugaac

SEQ ID NO: 101527 - DNA, 21 bp, Artificial Sequence
  Synthetic
gactguccccaggacatcuac

SEQ ID NO: 101528 - DNA, 27 bp, Artificial Sequence
  Synthetic
aatgactcauaggacttactgccuaga

SEQ ID NO: 101529 - DNA, 24 bp, Artificial Sequence
  Synthetic
cttcagtgcauaaaattcggcugt

SEQ ID NO: 101530 - DNA, 19 bp, Artificial Sequence
  Synthetic
agcacuggaccatgacgut

SEQ ID NO: 101531 - DNA, 18 bp, Artificial Sequence
  Synthetic
gggcgcuctgtttgucgt

SEQ ID NO: 101532 - DNA, 22 bp, Artificial Sequence
  Synthetic
actcctccaagutggtgacuga

SEQ ID NO: 101533 - DNA, 28 bp, Artificial Sequence
  Synthetic
agcatctgaattuagatgacaaggagut

SEQ ID NO: 101534 - DNA, 25 bp, Artificial Sequence
  Synthetic
tcacaaaagagaugacagccgaaut

SEQ ID NO: 101535 - DNA, 29 bp, Artificial Sequence
  Synthetic
agcttcacattggcutcaggttataaaua

SEQ ID NO: 101536 - DNA, 26 bp, Artificial Sequence
  Synthetic
ttgctctaaatgacucgtctgttcut

SEQ ID NO: 101537 - DNA, 23 bp, Artificial Sequence
  Synthetic
ctgatgcagagaguacagctguc

SEQ ID NO: 101538 - DNA, 26 bp, Artificial Sequence
  Synthetic
tgaagaatttcauaccgtctgcctuc

SEQ ID NO: 101539 - DNA, 26 bp, Artificial Sequence
  Synthetic
agctcaatuacgttatggttcugcat

SEQ ID NO: 101540 - DNA, 20 bp, Artificial Sequence
  Synthetic
gggcccagguatctggcuat

SEQ ID NO: 101541 - DNA, 19 bp, Artificial Sequence
  Synthetic
gctgctuctctcccugacc

SEQ ID NO: 101542 - DNA, 19 bp, Artificial Sequence
  Synthetic
caggcgcugguaagcagat

SEQ ID NO: 101543 - DNA, 18 bp, Artificial Sequence
  Synthetic
ggcccugcacttcuggag

SEQ ID NO: 101544 - DNA, 21 bp, Artificial Sequence
  Synthetic
caggaucaccagcagatgcua

SEQ ID NO: 101545 - DNA, 29 bp, Artificial Sequence
  Synthetic
ctgctgtatcgaauttagctctattugga

SEQ ID NO: 101546 - DNA, 22 bp, Artificial Sequence
  Synthetic
gccatcucagcctgttgtctut

SEQ ID NO: 101547 - DNA, 24 bp, Artificial Sequence
  Synthetic
tgtctgucagagaggatctuccac

SEQ ID NO: 101548 - DNA, 21 bp, Artificial Sequence
  Synthetic
ggtccagcutttccccagaut

SEQ ID NO: 101549 - DNA, 28 bp, Artificial Sequence
  Synthetic
acttgttcgagacugtgttcttttauga

SEQ ID NO: 101550 - DNA, 20 bp, Artificial Sequence
  Synthetic
acctccugcccaaagctcua

SEQ ID NO: 101551 - DNA, 20 bp, Artificial Sequence
  Synthetic
ctgagtucacccaggcugac

SEQ ID NO: 101552 - DNA, 20 bp, Artificial Sequence
  Synthetic
gcccautcatcugcgacaag

SEQ ID NO: 101553 - DNA, 25 bp, Artificial Sequence
  Synthetic
ttttgttcttutcaggagcuccaga

SEQ ID NO: 101554 - DNA, 23 bp, Artificial Sequence
  Synthetic
tgatggagaggaugatggcttug

SEQ ID NO: 101555 - DNA, 26 bp, Artificial Sequence
  Synthetic
ccatcctgtuaaggccagtttaaaut

SEQ ID NO: 101556 - DNA, 23 bp, Artificial Sequence
  Synthetic
acaatgtgacutgacacggcuat

SEQ ID NO: 101557 - DNA, 29 bp, Artificial Sequence
  Synthetic
ctgaagattgatguggagaagaataggut

SEQ ID NO: 101558 - DNA, 26 bp, Artificial Sequence
  Synthetic
ttctgcattctuctacagaggcuaag

SEQ ID NO: 101559 - DNA, 28 bp, Artificial Sequence
  Synthetic
tgccacttcaautgggaatgtacauaat

SEQ ID NO: 101560 - DNA, 22 bp, Artificial Sequence
  Synthetic
agctgagucactgtcatugcat

SEQ ID NO: 101561 - DNA, 28 bp, Artificial Sequence
  Synthetic
cctatgtagcccaguttctgaaacatua

SEQ ID NO: 101562 - DNA, 20 bp, Artificial Sequence
  Synthetic
ccccgcuctgcattcuacaa

SEQ ID NO: 101563 - DNA, 28 bp, Artificial Sequence
  Synthetic
ctgattccctaugtgccctaaaaauaga

SEQ ID NO: 101564 - DNA, 22 bp, Artificial Sequence
  Synthetic
gcttgcautgtggatgucagga

SEQ ID NO: 101565 - DNA, 27 bp, Artificial Sequence
  Synthetic
ggtgtgatagcuagataccaaactugt

SEQ ID NO: 101566 - DNA, 22 bp, Artificial Sequence
  Synthetic
ttugactggattauggccccaa

SEQ ID NO: 101567 - DNA, 25 bp, Artificial Sequence
  Synthetic
ccctggagaaacuacgaacttucaa

SEQ ID NO: 101568 - DNA, 23 bp, Artificial Sequence
  Synthetic
ttctggucaacaataugccacca

SEQ ID NO: 101569 - DNA, 22 bp, Artificial Sequence
  Synthetic
cgutccacagauggcagaaaac

SEQ ID NO: 101570 - DNA, 23 bp, Artificial Sequence
  Synthetic
ggagagacugcgaaagcttctut

SEQ ID NO: 101571 - DNA, 28 bp, Artificial Sequence
  Synthetic
ccccagtttccuacatcaaaaacatcua

SEQ ID NO: 101572 - DNA, 22 bp, Artificial Sequence
  Synthetic
ggtggttauccaggttgcugat

SEQ ID NO: 101573 - DNA, 23 bp, Artificial Sequence
  Synthetic
ccatggcttcugtttctctccua

SEQ ID NO: 101574 - DNA, 28 bp, Artificial Sequence
  Synthetic
ctgtagcttugacaaagatcaggaauct

SEQ ID NO: 101575 - DNA, 26 bp, Artificial Sequence
  Synthetic
caaautgaggctaauggagcaaaagt

SEQ ID NO: 101576 - DNA, 22 bp, Artificial Sequence
  Synthetic
gcctcugaccttaggauggaga

SEQ ID NO: 101577 - DNA, 18 bp, Artificial Sequence
  Synthetic
cucgcucgaccaccgaaa

SEQ ID NO: 101578 - DNA, 18 bp, Artificial Sequence
  Synthetic
ccccguagaggcggauga

SEQ ID NO: 101579 - DNA, 22 bp, Artificial Sequence
  Synthetic
agtcctgaguccttgcaaaucc

SEQ ID NO: 101580 - DNA, 26 bp, Artificial Sequence
  Synthetic
tgttttgagccautcatctactugct

SEQ ID NO: 101581 - DNA, 22 bp, Artificial Sequence
  Synthetic
tgatcccaucaggtaucccaca

SEQ ID NO: 101582 - DNA, 25 bp, Artificial Sequence
  Synthetic
cgtgttgtgguttgttcatttucct

SEQ ID NO: 101583 - DNA, 22 bp, Artificial Sequence
  Synthetic
gttcuggagaacccaagugaga

SEQ ID NO: 101584 - DNA, 20 bp, Artificial Sequence
  Synthetic
ctctaaagcccggucctcug

SEQ ID NO: 101585 - DNA, 22 bp, Artificial Sequence
  Synthetic
acatgcuaacccatgcaagugt

SEQ ID NO: 101586 - DNA, 28 bp, Artificial Sequence
  Synthetic
gtgtggtgtcuattaagtttctcaugga

SEQ ID NO: 101587 - DNA, 27 bp, Artificial Sequence
  Synthetic
tucaggaaaccaccattucaaaaacag

SEQ ID NO: 101588 - DNA, 28 bp, Artificial Sequence
  Synthetic
acgctguactgaacaauaaaaacaaagg

SEQ ID NO: 101589 - DNA, 21 bp, Artificial Sequence
  Synthetic
cgtgcugccagaagaaacuga

SEQ ID NO: 101590 - DNA, 18 bp, Artificial Sequence
  Synthetic
cgaggtgutgggctucct

SEQ ID NO: 101591 - DNA, 19 bp, Artificial Sequence
  Synthetic
tgccacaaagugcuggaga

SEQ ID NO: 101592 - DNA, 20 bp, Artificial Sequence
  Synthetic
ctccaggutccagucgaaca

SEQ ID NO: 101593 - DNA, 20 bp, Artificial Sequence
  Synthetic
ccctctuccccaccctaguc

SEQ ID NO: 101594 - DNA, 22 bp, Artificial Sequence
  Synthetic
agatggcccuggttttgaacuc

SEQ ID NO: 101595 - DNA, 28 bp, Artificial Sequence
  Synthetic
ggttctuccaacaaaaatgtcttaugct

SEQ ID NO: 101596 - DNA, 28 bp, Artificial Sequence
  Synthetic
gttcattacauttttcagatuggcagca

SEQ ID NO: 101597 - DNA, 24 bp, Artificial Sequence
  Synthetic
ccautgaagcuccagaaagggaaa

SEQ ID NO: 101598 - DNA, 20 bp, Artificial Sequence
  Synthetic
ccaccaguggaatgcaccua

SEQ ID NO: 101599 - DNA, 25 bp, Artificial Sequence
  Synthetic
cctucccagaaacaaacaagucact

SEQ ID NO: 101600 - DNA, 21 bp, Artificial Sequence
  Synthetic
actccaacuaccagctggcua

SEQ ID NO: 101601 - DNA, 25 bp, Artificial Sequence
  Synthetic
acgttttgaagautggctgaaguct

SEQ ID NO: 101602 - DNA, 23 bp, Artificial Sequence
  Synthetic
ggaaaagcagcugtcctttcuga

SEQ ID NO: 101603 - DNA, 28 bp, Artificial Sequence
  Synthetic
agcgaaaacaguctccaataatcugaat

SEQ ID NO: 101604 - DNA, 28 bp, Artificial Sequence
  Synthetic
ttaccacacautaagacacaaauagcct

SEQ ID NO: 101605 - DNA, 27 bp, Artificial Sequence
  Synthetic
cagtcacuccacagaatgtataugagt

SEQ ID NO: 101606 - DNA, 25 bp, Artificial Sequence
  Synthetic
accaacattctgugttctgcgtaut

SEQ ID NO: 101607 - DNA, 28 bp, Artificial Sequence
  Synthetic
tgacaaaattgccuttaaatagcacugg

SEQ ID NO: 101608 - DNA, 22 bp, Artificial Sequence
  Synthetic
gccaggaggacagauatuccat

SEQ ID NO: 101609 - DNA, 20 bp, Artificial Sequence
  Synthetic
cagagcuggccaagccaaua

SEQ ID NO: 101610 - DNA, 25 bp, Artificial Sequence
  Synthetic
tgacttucctttaagcuggcaaact

SEQ ID NO: 101611 - DNA, 19 bp, Artificial Sequence
  Synthetic
cctggagugggaucacgac

SEQ ID NO: 101612 - DNA, 25 bp, Artificial Sequence
  Synthetic
tcttccgagtuacaggaatcguaga

SEQ ID NO: 101613 - DNA, 20 bp, Artificial Sequence
  Synthetic
ctctcgcugaagugggacat

SEQ ID NO: 101614 - DNA, 21 bp, Artificial Sequence
  Synthetic
caggtcccgacugaggtcaua

SEQ ID NO: 101615 - DNA, 20 bp, Artificial Sequence
  Synthetic
tgcagacagccugctttcuc

SEQ ID NO: 101616 - DNA, 23 bp, Artificial Sequence
  Synthetic
cgtgacacauacacgttacugga

SEQ ID NO: 101617 - DNA, 26 bp, Artificial Sequence
  Synthetic
gtatttcttcaaugccgaacaucact

SEQ ID NO: 101618 - DNA, 21 bp, Artificial Sequence
  Synthetic
gagagatuggaggaaggcugt

SEQ ID NO: 101619 - DNA, 20 bp, Artificial Sequence
  Synthetic
tgacagggutgccttgacut

SEQ ID NO: 101620 - DNA, 23 bp, Artificial Sequence
  Synthetic
ggtttcttgucctcactcugcat

SEQ ID NO: 101621 - DNA, 26 bp, Artificial Sequence
  Synthetic
gagaaaggcagucaaagtgtucaaaa

SEQ ID NO: 101622 - DNA, 23 bp, Artificial Sequence
  Synthetic
ccatcactuacctggguaccaac

SEQ ID NO: 101623 - DNA, 28 bp, Artificial Sequence
  Synthetic
ggctgttttacugcttatttgaccaaut

SEQ ID NO: 101624 - DNA, 23 bp, Artificial Sequence
  Synthetic
ggttugagagcatgcttuccaat

SEQ ID NO: 101625 - DNA, 21 bp, Artificial Sequence
  Synthetic
ccctacaagauctggcugacc

SEQ ID NO: 101626 - DNA, 22 bp, Artificial Sequence
  Synthetic
cacgtugctcaaggucacaaac

SEQ ID NO: 101627 - DNA, 29 bp, Artificial Sequence
  Synthetic
tctttctttctctcucactctgtcttgua

SEQ ID NO: 101628 - DNA, 24 bp, Artificial Sequence
  Synthetic
tcttctccugaccagtttcuagca

SEQ ID NO: 101629 - DNA, 25 bp, Artificial Sequence
  Synthetic
gagtcttgtgguctctgcttctuag

SEQ ID NO: 101630 - DNA, 28 bp, Artificial Sequence
  Synthetic
ccagttaagagguaactaaguacacagt

SEQ ID NO: 101631 - DNA, 24 bp, Artificial Sequence
  Synthetic
gaagacagcttuccatcgacacua

SEQ ID NO: 101632 - DNA, 22 bp, Artificial Sequence
  Synthetic
tccctucagaggctggtcuaaa

SEQ ID NO: 101633 - DNA, 28 bp, Artificial Sequence
  Synthetic
actgaacaacctauatgctctggtttuc

SEQ ID NO: 101634 - DNA, 23 bp, Artificial Sequence
  Synthetic
aagaagcccaugattcaucagca

SEQ ID NO: 101635 - DNA, 19 bp, Artificial Sequence
  Synthetic
gatccccgaggaugtggut

SEQ ID NO: 101636 - DNA, 22 bp, Artificial Sequence
  Synthetic
agagcagcaugacagagaggua

SEQ ID NO: 101637 - DNA, 28 bp, Artificial Sequence
  Synthetic
gaaattgcatttucagcatttgttguct

SEQ ID NO: 101638 - DNA, 25 bp, Artificial Sequence
  Synthetic
gaucacaucaacacaaaacaggcaa

SEQ ID NO: 101639 - DNA, 22 bp, Artificial Sequence
  Synthetic
caccugaagtugacagggagat

SEQ ID NO: 101640 - DNA, 23 bp, Artificial Sequence
  Synthetic
gctgtcggautacagtgacacut

SEQ ID NO: 101641 - DNA, 23 bp, Artificial Sequence
  Synthetic
cccguagcagcaagaagtagtug

SEQ ID NO: 101642 - DNA, 21 bp, Artificial Sequence
  Synthetic
caggtgaccuctaagcggtut

SEQ ID NO: 101643 - DNA, 27 bp, Artificial Sequence
  Synthetic
agaagatgaautgaattcucacgagca

SEQ ID NO: 101644 - DNA, 24 bp, Artificial Sequence
  Synthetic
ccaacatagutcatgctcgugaga

SEQ ID NO: 101645 - DNA, 27 bp, Artificial Sequence
  Synthetic
gctgtctaaaugagtgctttauggact

SEQ ID NO: 101646 - DNA, 20 bp, Artificial Sequence
  Synthetic
cagacugccaaggaacccua

SEQ ID NO: 101647 - DNA, 26 bp, Artificial Sequence
  Synthetic
acaagacuaaaaggcaaccaaaguca

SEQ ID NO: 101648 - DNA, 23 bp, Artificial Sequence
  Synthetic
ccaaauaccttaucaggccacca

SEQ ID NO: 101649 - DNA, 26 bp, Artificial Sequence
  Synthetic
ggcttgauggagcctcatttgauaat

SEQ ID NO: 101650 - DNA, 22 bp, Artificial Sequence
  Synthetic
ccttgctgguagaaccccttuc

SEQ ID NO: 101651 - DNA, 21 bp, Artificial Sequence
  Synthetic
ggtgugacccaattgcauacc

SEQ ID NO: 101652 - DNA, 21 bp, Artificial Sequence
  Synthetic
cgccagagcaggutgtaacua

SEQ ID NO: 101653 - DNA, 20 bp, Artificial Sequence
  Synthetic
ccgutcaacagguccacgag

SEQ ID NO: 101654 - DNA, 28 bp, Artificial Sequence
  Synthetic
gcattaaaaggauaaagaagtgtuggca

SEQ ID NO: 101655 - DNA, 28 bp, Artificial Sequence
  Synthetic
ctgcctttctcucattctaactgtctua

SEQ ID NO: 101656 - DNA, 24 bp, Artificial Sequence
  Synthetic
ccgttgtatcgugtttgctgttuc

SEQ ID NO: 101657 - DNA, 25 bp, Artificial Sequence
  Synthetic
gctctttgacuggcatatacagcut

SEQ ID NO: 101658 - DNA, 29 bp, Artificial Sequence
  Synthetic
tgaagaactttguatgtttctgtagcuga

SEQ ID NO: 101659 - DNA, 28 bp, Artificial Sequence
  Synthetic
gtcttgctatgtauctttcccactgtua

SEQ ID NO: 101660 - DNA, 21 bp, Artificial Sequence
  Synthetic
ctctcucaagccagtggtugt

SEQ ID NO: 101661 - DNA, 28 bp, Artificial Sequence
  Synthetic
caagctgagaagaucttggatacugaaa

SEQ ID NO: 101662 - DNA, 25 bp, Artificial Sequence
  Synthetic
agtaacugctgtgctucaaacagat

SEQ ID NO: 101663 - DNA, 28 bp, Artificial Sequence
  Synthetic
aggttgaaaagaugctaagcaatttugg

SEQ ID NO: 101664 - DNA, 22 bp, Artificial Sequence
  Synthetic
aaccagucacaacagtgcctua

SEQ ID NO: 101665 - DNA, 23 bp, Artificial Sequence
  Synthetic
ccctccaguccatctcuacgaag

SEQ ID NO: 101666 - DNA, 21 bp, Artificial Sequence
  Synthetic
tttcagcucaatggccuccat

SEQ ID NO: 101667 - DNA, 28 bp, Artificial Sequence
  Synthetic
gcatttggtaataucccttttctggugt

SEQ ID NO: 101668 - DNA, 32 bp, Artificial Sequence
  Synthetic
agtaaaagctaagcuaagctaaatctucacat

SEQ ID NO: 101669 - DNA, 28 bp, Artificial Sequence
  Synthetic
cgaaaggcgaaugctcattttatatuga

SEQ ID NO: 101670 - DNA, 27 bp, Artificial Sequence
  Synthetic
ggagaaccacacugtcacataacaaut

SEQ ID NO: 101671 - DNA, 28 bp, Artificial Sequence
  Synthetic
gtgtcttctucattgttgttttguacca

SEQ ID NO: 101672 - DNA, 28 bp, Artificial Sequence
  Synthetic
ctcagagaagaaaguttaggacttguca

SEQ ID NO: 101673 - DNA, 22 bp, Artificial Sequence
  Synthetic
gtccaggcugagaaccttguaa

SEQ ID NO: 101674 - DNA, 22 bp, Artificial Sequence
  Synthetic
agcggtatcuctgaagctucct

SEQ ID NO: 101675 - DNA, 26 bp, Artificial Sequence
  Synthetic
tgcactttattugagggcagagauaa

SEQ ID NO: 101676 - DNA, 28 bp, Artificial Sequence
  Synthetic
tcaaaagtacucaagaaggaaugaagca

SEQ ID NO: 101677 - DNA, 21 bp, Artificial Sequence
  Synthetic
gaactucaccggtggucagat

SEQ ID NO: 101678 - DNA, 23 bp, Artificial Sequence
  Synthetic
gtggcugatgaatcuccagacat

SEQ ID NO: 101679 - DNA, 28 bp, Artificial Sequence
  Synthetic
accactgttaagguagtcttttcttugt

SEQ ID NO: 101680 - DNA, 27 bp, Artificial Sequence
  Synthetic
gcaaacgcatauagtagtctcaagcua

SEQ ID NO: 101681 - DNA, 28 bp, Artificial Sequence
  Synthetic
aagaacaggaugatattgttucagcaga

SEQ ID NO: 101682 - DNA, 22 bp, Artificial Sequence
  Synthetic
ctgtaagcaacacccuggtcut

SEQ ID NO: 101683 - DNA, 21 bp, Artificial Sequence
  Synthetic
tcacagtucttgagcgugagg

SEQ ID NO: 101684 - DNA, 27 bp, Artificial Sequence
  Synthetic
accacaatuaaaatcacctctuccaca

SEQ ID NO: 101685 - DNA, 28 bp, Artificial Sequence
  Synthetic
cccactcauaagcttctgattcttuaca

SEQ ID NO: 101686 - DNA, 26 bp, Artificial Sequence
  Synthetic
ttgtttaaaaagggcacucgattgug

SEQ ID NO: 101687 - DNA, 21 bp, Artificial Sequence
  Synthetic
cagcagctgutgattccgtug

SEQ ID NO: 101688 - DNA, 26 bp, Artificial Sequence
  Synthetic
agggtacacguaatcccatttttguc

SEQ ID NO: 101689 - DNA, 25 bp, Artificial Sequence
  Synthetic
ggatagtauggaagccaaccugaat

SEQ ID NO: 101690 - DNA, 26 bp, Artificial Sequence
  Synthetic
gacgtcatcugcttttctaattccuc

SEQ ID NO: 101691 - DNA, 28 bp, Artificial Sequence
  Synthetic
ggcacttaatgguctttcatggaattut

SEQ ID NO: 101692 - DNA, 26 bp, Artificial Sequence
  Synthetic
ccaaaccctauaaacaggcctuaaga

SEQ ID NO: 101693 - DNA, 21 bp, Artificial Sequence
  Synthetic
gcggugaagtcaatgugcaaa

SEQ ID NO: 101694 - DNA, 28 bp, Artificial Sequence
  Synthetic
tcattgaaagagguaaaactgaucagca

SEQ ID NO: 101695 - DNA, 28 bp, Artificial Sequence
  Synthetic
aaaggtctacuagatgtgctuccaaaaa

SEQ ID NO: 101696 - DNA, 29 bp, Artificial Sequence
  Synthetic
gcctaaaatcttcugccgttaaatctuct

SEQ ID NO: 101697 - DNA, 26 bp, Artificial Sequence
  Synthetic
ggctgctaaaautatgtcttgtgcut

SEQ ID NO: 101698 - DNA, 26 bp, Artificial Sequence
  Synthetic
aaaacataagtaugcccacacctuct

SEQ ID NO: 101699 - DNA, 25 bp, Artificial Sequence
  Synthetic
ccacttttuacagccttgugaacaa

SEQ ID NO: 101700 - DNA, 21 bp, Artificial Sequence
  Synthetic
cgcatgcugcctttctgatuc

SEQ ID NO: 101701 - DNA, 28 bp, Artificial Sequence
  Synthetic
gactcctaaggautctcaatgtggatut

SEQ ID NO: 101702 - DNA, 22 bp, Artificial Sequence
  Synthetic
cacagcatggautcgcttcauc

SEQ ID NO: 101703 - DNA, 24 bp, Artificial Sequence
  Synthetic
gaaagtgaacaaugttggttgcut

SEQ ID NO: 101704 - DNA, 24 bp, Artificial Sequence
  Synthetic
aggagacacuccattcugacaagt

SEQ ID NO: 101705 - DNA, 28 bp, Artificial Sequence
  Synthetic
cgtcatatcaaggaacuggagaagtuat

SEQ ID NO: 101706 - DNA, 24 bp, Artificial Sequence
  Synthetic
ggcttgtccuttgaaatcccugaa

SEQ ID NO: 101707 - DNA, 22 bp, Artificial Sequence
  Synthetic
agaacgagccugttctgtugac

SEQ ID NO: 101708 - DNA, 23 bp, Artificial Sequence
  Synthetic
ctgctgactacutgacacgtcua

SEQ ID NO: 101709 - DNA, 22 bp, Artificial Sequence
  Synthetic
gccaactacuggtgaatgcuga

SEQ ID NO: 101710 - DNA, 21 bp, Artificial Sequence
  Synthetic
gautgatgtggugcgcacaat

SEQ ID NO: 101711 - DNA, 26 bp, Artificial Sequence
  Synthetic
actaaaacgacccacutgttctguag

SEQ ID NO: 101712 - DNA, 22 bp, Artificial Sequence
  Synthetic
agaggaatgucagcgcatctut

SEQ ID NO: 101713 - DNA, 26 bp, Artificial Sequence
  Synthetic
gtcaaacttttaggugacctcctcut

SEQ ID NO: 101714 - DNA, 25 bp, Artificial Sequence
  Synthetic
tttggcttcuaaacagtctgtucct

SEQ ID NO: 101715 - DNA, 26 bp, Artificial Sequence
  Synthetic
gcacttttggagcutttgccaatuat

SEQ ID NO: 101716 - DNA, 22 bp, Artificial Sequence
  Synthetic
ctgatgctugttttgccgtuca

SEQ ID NO: 101717 - DNA, 27 bp, Artificial Sequence
  Synthetic
gcuagtaaaaagacugacaaagcagga

SEQ ID NO: 101718 - DNA, 20 bp, Artificial Sequence
  Synthetic
gagtggccugtgttguccat

SEQ ID NO: 101719 - DNA, 19 bp, Artificial Sequence
  Synthetic
gtcaugcaggcggcaatuc

SEQ ID NO: 101720 - DNA, 24 bp, Artificial Sequence
  Synthetic
tgtgttgcuaaatccatggcucat

SEQ ID NO: 101721 - DNA, 26 bp, Artificial Sequence
  Synthetic
aattaaagtaccguctgctctcacug

SEQ ID NO: 101722 - DNA, 23 bp, Artificial Sequence
  Synthetic
aatgagcacuagtcgaggtcuct

SEQ ID NO: 101723 - DNA, 20 bp, Artificial Sequence
  Synthetic
gacatgguctggatgcugct

SEQ ID NO: 101724 - DNA, 24 bp, Artificial Sequence
  Synthetic
catcctcaguagcttcaaaccuct

SEQ ID NO: 101725 - DNA, 23 bp, Artificial Sequence
  Synthetic
ccaccguccacttugaaagaaaa

SEQ ID NO: 101726 - DNA, 22 bp, Artificial Sequence
  Synthetic
agaacaucgacgatgaguccct

SEQ ID NO: 101727 - DNA, 24 bp, Artificial Sequence
  Synthetic
tgcaggauggatgatactcucaga

SEQ ID NO: 101728 - DNA, 22 bp, Artificial Sequence
  Synthetic
agcuttgactcugcaagaacca

SEQ ID NO: 101729 - DNA, 27 bp, Artificial Sequence
  Synthetic
acaggttaaguaagcatcagttctgut

SEQ ID NO: 101730 - DNA, 23 bp, Artificial Sequence
  Synthetic
ggaattggcuctggcaactgtua

SEQ ID NO: 101731 - DNA, 22 bp, Artificial Sequence
  Synthetic
gttttcgcggagugtttguagg

SEQ ID NO: 101732 - DNA, 22 bp, Artificial Sequence
  Synthetic
aaatcatcacucggccaaugga

SEQ ID NO: 101733 - DNA, 27 bp, Artificial Sequence
  Synthetic
tgcaatcacggaacauttgattctuac

SEQ ID NO: 101734 - DNA, 22 bp, Artificial Sequence
  Synthetic
aaauggcccaaaactcugacct

SEQ ID NO: 101735 - DNA, 23 bp, Artificial Sequence
  Synthetic
gctcaauggcacgatuaccagaa

SEQ ID NO: 101736 - DNA, 28 bp, Artificial Sequence
  Synthetic
gtgcttcatgaugttgacatattcctut

SEQ ID NO: 101737 - DNA, 22 bp, Artificial Sequence
  Synthetic
cttgaguaccaaggccactcug

SEQ ID NO: 101738 - DNA, 18 bp, Artificial Sequence
  Synthetic
gtggacucagcgcagugt

SEQ ID NO: 101739 - DNA, 24 bp, Artificial Sequence
  Synthetic
ggagaagtugaatgatcagcugga

SEQ ID NO: 101740 - DNA, 27 bp, Artificial Sequence
  Synthetic
atcaattcaauaacctcttccctugct

SEQ ID NO: 101741 - DNA, 25 bp, Artificial Sequence
  Synthetic
acaccagagcutcgtgtagaaauac

SEQ ID NO: 101742 - DNA, 22 bp, Artificial Sequence
  Synthetic
gtggtggcutctggtctctuat

SEQ ID NO: 101743 - DNA, 23 bp, Artificial Sequence
  Synthetic
ggctgttguacagttccttccuc

SEQ ID NO: 101744 - DNA, 23 bp, Artificial Sequence
  Synthetic
ggagcaaccaagacauctctugt

SEQ ID NO: 101745 - DNA, 22 bp, Artificial Sequence
  Synthetic
agcagcauggctccagattuag

SEQ ID NO: 101746 - DNA, 24 bp, Artificial Sequence
  Synthetic
ggagatggugatcttgcagaugaa

SEQ ID NO: 101747 - DNA, 22 bp, Artificial Sequence
  Synthetic
agaagcaatggutgaggccuac

SEQ ID NO: 101748 - DNA, 27 bp, Artificial Sequence
  Synthetic
acctatauccaagctcattuagacggt

SEQ ID NO: 101749 - DNA, 24 bp, Artificial Sequence
  Synthetic
agaaattcacugcgcacttugaaa

SEQ ID NO: 101750 - DNA, 22 bp, Artificial Sequence
  Synthetic
gaaatgggugagtggaggacut

SEQ ID NO: 101751 - DNA, 22 bp, Artificial Sequence
  Synthetic
cgaaggtcugcatctgttccug

SEQ ID NO: 101752 - DNA, 22 bp, Artificial Sequence
  Synthetic
cagccagugaagaagacaguga

SEQ ID NO: 101753 - DNA, 28 bp, Artificial Sequence
  Synthetic
ttccaactctauacaaagcccctaguat

SEQ ID NO: 101754 - DNA, 27 bp, Artificial Sequence
  Synthetic
tttctcaaataaccugcataccgtcut

SEQ ID NO: 101755 - DNA, 23 bp, Artificial Sequence
  Synthetic
ggatttaggutgaggtgguggag

SEQ ID NO: 101756 - DNA, 23 bp, Artificial Sequence
  Synthetic
cccgtgttcutcctgttcaucat

SEQ ID NO: 101757 - DNA, 29 bp, Artificial Sequence
  Synthetic
caaattctctauagttagtggtctucgca

SEQ ID NO: 101758 - DNA, 26 bp, Artificial Sequence
  Synthetic
gccatgacaaggaautctttttcugt

SEQ ID NO: 101759 - DNA, 28 bp, Artificial Sequence
  Synthetic
cagctattcaaucggatcaactctctut

SEQ ID NO: 101760 - DNA, 25 bp, Artificial Sequence
  Synthetic
cttcttcucaagacaaggactggua

SEQ ID NO: 101761 - DNA, 22 bp, Artificial Sequence
  Synthetic
cgtcgttcaugacgaggtaugg

SEQ ID NO: 101762 - DNA, 21 bp, Artificial Sequence
  Synthetic
agggcacacaagugttgacuc

SEQ ID NO: 101763 - DNA, 26 bp, Artificial Sequence
  Synthetic
gagtgggcatautttcacctcttcua

SEQ ID NO: 101764 - DNA, 22 bp, Artificial Sequence
  Synthetic
gggacacaauggcaagatcuac

SEQ ID NO: 101765 - DNA, 21 bp, Artificial Sequence
  Synthetic
cctcttgguggtctccttuct

SEQ ID NO: 101766 - DNA, 22 bp, Artificial Sequence
  Synthetic
gcugaacccctgttuggagaag

SEQ ID NO: 101767 - DNA, 21 bp, Artificial Sequence
  Synthetic
acccucaaaggctaacgugag

SEQ ID NO: 101768 - DNA, 28 bp, Artificial Sequence
  Synthetic
acagtttctucagaaatcctgcttucat

SEQ ID NO: 101769 - DNA, 28 bp, Artificial Sequence
  Synthetic
tgtttttagggaaaauggagctgauagt

SEQ ID NO: 101770 - DNA, 27 bp, Artificial Sequence
  Synthetic
agatccaggatacuatcagctccatut

SEQ ID NO: 101771 - DNA, 27 bp, Artificial Sequence
  Synthetic
caggtgcatuggatatttattgacucc

SEQ ID NO: 101772 - DNA, 28 bp, Artificial Sequence
  Synthetic
taaggctugagacactttgtatttaugt

SEQ ID NO: 101773 - DNA, 26 bp, Artificial Sequence
  Synthetic
gtctgcaaauagcataagagcaacug

SEQ ID NO: 101774 - DNA, 25 bp, Artificial Sequence
  Synthetic
tgcagacaggaggacuatctttuca

SEQ ID NO: 101775 - DNA, 28 bp, Artificial Sequence
  Synthetic
gccttacagaaaugcccaggtatttuat

SEQ ID NO: 101776 - DNA, 23 bp, Artificial Sequence
  Synthetic
ctctgtttugagcttccgguaga

SEQ ID NO: 101777 - DNA, 20 bp, Artificial Sequence
  Synthetic
gcagtgauggtagctgcugt

SEQ ID NO: 101778 - DNA, 21 bp, Artificial Sequence
  Synthetic
tctgtguaacagcagcauggt

SEQ ID NO: 101779 - DNA, 19 bp, Artificial Sequence
  Synthetic
gatgccatugccagcguag

SEQ ID NO: 101780 - DNA, 25 bp, Artificial Sequence
  Synthetic
caccaattcatguacacgacaggua

SEQ ID NO: 101781 - DNA, 22 bp, Artificial Sequence
  Synthetic
aagtaauggcccaggtaaucgg

SEQ ID NO: 101782 - DNA, 26 bp, Artificial Sequence
  Synthetic
cacattacctucggctacttgaugat

SEQ ID NO: 101783 - DNA, 27 bp, Artificial Sequence
  Synthetic
agcgttcugaaagaaatacattugcag

SEQ ID NO: 101784 - DNA, 27 bp, Artificial Sequence
  Synthetic
actgttgttttauttccggtctauggg

SEQ ID NO: 101785 - DNA, 23 bp, Artificial Sequence
  Synthetic
ccautgatgtugccgaaaaggaa

SEQ ID NO: 101786 - DNA, 20 bp, Artificial Sequence
  Synthetic
ccactauagcgaccccaugt

SEQ ID NO: 101787 - DNA, 21 bp, Artificial Sequence
  Synthetic
cacacaaaggaccuggctcua

SEQ ID NO: 101788 - DNA, 21 bp, Artificial Sequence
  Synthetic
ccucaacagcagaaagcctut

SEQ ID NO: 101789 - DNA, 33 bp, Artificial Sequence
  Synthetic
tagagattagtgttuagtggactatacatacuc

SEQ ID NO: 101790 - DNA, 21 bp, Artificial Sequence
  Synthetic
gaggcggcccautttcttuag

SEQ ID NO: 101791 - DNA, 21 bp, Artificial Sequence
  Synthetic
gcacctccutcctctgctuag

SEQ ID NO: 101792 - DNA, 24 bp, Artificial Sequence
  Synthetic
ccctcuaaagaacagcttgtccua

SEQ ID NO: 101793 - DNA, 21 bp, Artificial Sequence
  Synthetic
ttgutgaggctaucgcaggag

SEQ ID NO: 101794 - DNA, 21 bp, Artificial Sequence
  Synthetic
ctgtggcaauggaatucagca

SEQ ID NO: 101795 - DNA, 23 bp, Artificial Sequence
  Synthetic
gacaacaaggacaggucagtuct

SEQ ID NO: 101796 - DNA, 19 bp, Artificial Sequence
  Synthetic
ggucccugagagccagagt

SEQ ID NO: 101797 - DNA, 18 bp, Artificial Sequence
  Synthetic
gccctaguggtgcugaca

SEQ ID NO: 101798 - DNA, 20 bp, Artificial Sequence
  Synthetic
atgcuaaggccccucagaac

SEQ ID NO: 101799 - DNA, 22 bp, Artificial Sequence
  Synthetic
tcaatagcttgugccgcaagua

SEQ ID NO: 101800 - DNA, 24 bp, Artificial Sequence
  Synthetic
gcatcugggataactacuccccat

SEQ ID NO: 101801 - DNA, 22 bp, Artificial Sequence
  Synthetic
acagcagcaauacgaggacauc

SEQ ID NO: 101802 - DNA, 27 bp, Artificial Sequence
  Synthetic
gtttctttaucagaccagtcatugcac

SEQ ID NO: 101803 - DNA, 28 bp, Artificial Sequence
  Synthetic
aaagaacutcaaagucaacaaagcaaca

SEQ ID NO: 101804 - DNA, 21 bp, Artificial Sequence
  Synthetic
tctctcctucgccctcctuag

SEQ ID NO: 101805 - DNA, 23 bp, Artificial Sequence
  Synthetic
tgcattcttcucgcactcttcut

SEQ ID NO: 101806 - DNA, 22 bp, Artificial Sequence
  Synthetic
cttcctgaguagccgatgagut

SEQ ID NO: 101807 - DNA, 21 bp, Artificial Sequence
  Synthetic
gctctctugacccagctcuct

SEQ ID NO: 101808 - DNA, 23 bp, Artificial Sequence
  Synthetic
gtggauggagacgggaaatttug

SEQ ID NO: 101809 - DNA, 22 bp, Artificial Sequence
  Synthetic
gatgcgatucacatgctggaut

SEQ ID NO: 101810 - DNA, 29 bp, Artificial Sequence
  Synthetic
actgattgtgggutaagatggtattugaa

SEQ ID NO: 101811 - DNA, 20 bp, Artificial Sequence
  Synthetic
tctcttggugttggctucgt

SEQ ID NO: 101812 - DNA, 20 bp, Artificial Sequence
  Synthetic
ggatgtcggguggcagtaug

SEQ ID NO: 101813 - DNA, 26 bp, Artificial Sequence
  Synthetic
cagctcgaaaaccauttctgtcatut

SEQ ID NO: 101814 - DNA, 28 bp, Artificial Sequence
  Synthetic
aacgtttggaaaucttttctaccuacct

SEQ ID NO: 101815 - DNA, 26 bp, Artificial Sequence
  Synthetic
tcttcatcucgaaacgtgcgauaaat

SEQ ID NO: 101816 - DNA, 20 bp, Artificial Sequence
  Synthetic
ccacuggacgctgtcucaag

SEQ ID NO: 101817 - DNA, 28 bp, Artificial Sequence
  Synthetic
aaggaagtgguaaatcaaactcacauga

SEQ ID NO: 101818 - DNA, 27 bp, Artificial Sequence
  Synthetic
attcttggtcutaatggcgaguaacaa

SEQ ID NO: 101819 - DNA, 25 bp, Artificial Sequence
  Synthetic
ccucaatcacaauaagaccaccaga

SEQ ID NO: 101820 - DNA, 27 bp, Artificial Sequence
  Synthetic
gtatttgcaguaggaagatgttgguca

SEQ ID NO: 101821 - DNA, 28 bp, Artificial Sequence
  Synthetic
ggctttgtgtatauactgccagagtuaa

SEQ ID NO: 101822 - DNA, 22 bp, Artificial Sequence
  Synthetic
ggagctgugtttcaaccttucc

SEQ ID NO: 101823 - DNA, 27 bp, Artificial Sequence
  Synthetic
tgtgactguaagtgaaagtgaaucagt

SEQ ID NO: 101824 - DNA, 24 bp, Artificial Sequence
  Synthetic
gggtaugacagcattaactuccat

SEQ ID NO: 101825 - DNA, 29 bp, Artificial Sequence
  Synthetic
attcctcuaaacagattcucaaacagaaa

SEQ ID NO: 101826 - DNA, 28 bp, Artificial Sequence
  Synthetic
cgtggatgatguaatgaaggattcttug

SEQ ID NO: 101827 - DNA, 22 bp, Artificial Sequence
  Synthetic
ggctgucagcaguaaaggagaa

SEQ ID NO: 101828 - DNA, 25 bp, Artificial Sequence
  Synthetic
gacagccagaagutcagaauacaga

SEQ ID NO: 101829 - DNA, 29 bp, Artificial Sequence
  Synthetic
tgatgaagtgatuaaagtgacagtgtuca

SEQ ID NO: 101830 - DNA, 23 bp, Artificial Sequence
  Synthetic
agttttgauccgaacctcgugaa

SEQ ID NO: 101831 - DNA, 22 bp, Artificial Sequence
  Synthetic
gactcctucagcatcttccugt

SEQ ID NO: 101832 - DNA, 20 bp, Artificial Sequence
  Synthetic
cggtaagttuggcggcagua

SEQ ID NO: 101833 - DNA, 23 bp, Artificial Sequence
  Synthetic
gaaacgacatugtcacagagcut

SEQ ID NO: 101834 - DNA, 26 bp, Artificial Sequence
  Synthetic
tgtggaagatugctgtgttctgtuat

SEQ ID NO: 101835 - DNA, 22 bp, Artificial Sequence
  Synthetic
cgtaaagguacgagugacggaa

SEQ ID NO: 101836 - DNA, 24 bp, Artificial Sequence
  Synthetic
caaagcugccctgttauaaaagcc

SEQ ID NO: 101837 - DNA, 26 bp, Artificial Sequence
  Synthetic
ttttctatagaccucctgtggucagt

SEQ ID NO: 101838 - DNA, 24 bp, Artificial Sequence
  Synthetic
tcttuatccagagcucagcagaga

SEQ ID NO: 101839 - DNA, 21 bp, Artificial Sequence
  Synthetic
gtagcgtucccgctgttcuat

SEQ ID NO: 101840 - DNA, 21 bp, Artificial Sequence
  Synthetic
accctguacctgacccugaaa

SEQ ID NO: 101841 - DNA, 20 bp, Artificial Sequence
  Synthetic
gatuggccacggctaugagt

SEQ ID NO: 101842 - DNA, 23 bp, Artificial Sequence
  Synthetic
gacgaggaaaagautggcucaga

SEQ ID NO: 101843 - DNA, 19 bp, Artificial Sequence
  Synthetic
atcagaucgcaccggugac

SEQ ID NO: 101844 - DNA, 26 bp, Artificial Sequence
  Synthetic
tgaatattggguaccaaggagccaua

SEQ ID NO: 101845 - DNA, 28 bp, Artificial Sequence
  Synthetic
cacattaagaaaaugggagcgattugaa

SEQ ID NO: 101846 - DNA, 27 bp, Artificial Sequence
  Synthetic
ttcatgacuggaacctgttugaaaaag

SEQ ID NO: 101847 - DNA, 25 bp, Artificial Sequence
  Synthetic
tgaaagutgacagtttugcaaacga

SEQ ID NO: 101848 - DNA, 25 bp, Artificial Sequence
  Synthetic
ggagctttgcutctagaacttugct

SEQ ID NO: 101849 - DNA, 29 bp, Artificial Sequence
  Synthetic
ccattcaatgttutggatttgcttcugat

SEQ ID NO: 101850 - DNA, 25 bp, Artificial Sequence
  Synthetic
gcctgacttcutttctactggtgua

SEQ ID NO: 101851 - DNA, 22 bp, Artificial Sequence
  Synthetic
actcagcaauctgtgacagucc

SEQ ID NO: 101852 - DNA, 28 bp, Artificial Sequence
  Synthetic
actcagggaaaaaugaatttacgtgcua

SEQ ID NO: 101853 - DNA, 21 bp, Artificial Sequence
  Synthetic
acucaggagccagaggaugag

SEQ ID NO: 101854 - DNA, 25 bp, Artificial Sequence
  Synthetic
gaaatacctcugcaagagauccact

SEQ ID NO: 101855 - DNA, 20 bp, Artificial Sequence
  Synthetic
acccuggacccactcaucaa

SEQ ID NO: 101856 - DNA, 21 bp, Artificial Sequence
  Synthetic
ggaccattuccagctcttgug

SEQ ID NO: 101857 - DNA, 29 bp, Artificial Sequence
  Synthetic
aggtgagtagaagauagggatgaaatgut

SEQ ID NO: 101858 - DNA, 23 bp, Artificial Sequence
  Synthetic
gttctaggtcutctttgccggut

SEQ ID NO: 101859 - DNA, 20 bp, Artificial Sequence
  Synthetic
tgutacagcuggcaggcaat

SEQ ID NO: 101860 - DNA, 19 bp, Artificial Sequence
  Synthetic
tctgcgcuctccacgtcua

SEQ ID NO: 101861 - DNA, 27 bp, Artificial Sequence
  Synthetic
ggagagttgautatgtttgcaatugct

SEQ ID NO: 101862 - DNA, 24 bp, Artificial Sequence
  Synthetic
gatcctccuttctagcattuggct

SEQ ID NO: 101863 - DNA, 21 bp, Artificial Sequence
  Synthetic
tttgaagugcctctggcugaa

SEQ ID NO: 101864 - DNA, 21 bp, Artificial Sequence
  Synthetic
cctgcaacagaugtggcugat

SEQ ID NO: 101865 - DNA, 23 bp, Artificial Sequence
  Synthetic
gaaacuggccaaaaccatccaut

SEQ ID NO: 101866 - DNA, 22 bp, Artificial Sequence
  Synthetic
catggaguctgaacgucggaaa

SEQ ID NO: 101867 - DNA, 27 bp, Artificial Sequence
  Synthetic
gttaaaggtcugttaccctaauccagt

SEQ ID NO: 101868 - DNA, 24 bp, Artificial Sequence
  Synthetic
aggaagttugcagcacagaagaua

SEQ ID NO: 101869 - DNA, 23 bp, Artificial Sequence
  Synthetic
agcuttgcaguccaaaaggaaac

SEQ ID NO: 101870 - DNA, 23 bp, Artificial Sequence
  Synthetic
ccatcagcuctgtatggaacugg

SEQ ID NO: 101871 - DNA, 25 bp, Artificial Sequence
  Synthetic
agttgctgacutctttcttccugaa

SEQ ID NO: 101872 - DNA, 20 bp, Artificial Sequence
  Synthetic
ctcccaugggccaacugaaa

SEQ ID NO: 101873 - DNA, 27 bp, Artificial Sequence
  Synthetic
tgggacatggagutgttaaaagaauct

SEQ ID NO: 101874 - DNA, 26 bp, Artificial Sequence
  Synthetic
ttgcaactcucaaggcctauaaacat

SEQ ID NO: 101875 - DNA, 25 bp, Artificial Sequence
  Synthetic
cgaattggagaucaggcttctgtuc

SEQ ID NO: 101876 - DNA, 25 bp, Artificial Sequence
  Synthetic
acctgacagtcuttcagtgcattut

SEQ ID NO: 101877 - DNA, 23 bp, Artificial Sequence
  Synthetic
tgtgtttgtucagatccagcugt

SEQ ID NO: 101878 - DNA, 24 bp, Artificial Sequence
  Synthetic
tcaggaaattcuccctgctcuact

SEQ ID NO: 101879 - DNA, 24 bp, Artificial Sequence
  Synthetic
cacccagcauatcataccacaguc

SEQ ID NO: 101880 - DNA, 25 bp, Artificial Sequence
  Synthetic
gaccaagatuccaataagcctucca

SEQ ID NO: 101881 - DNA, 31 bp, Artificial Sequence
  Synthetic
ttcttaattuggagaaaatactggcuagaat

SEQ ID NO: 101882 - DNA, 19 bp, Artificial Sequence
  Synthetic
tggctgaguggcgttaugg

SEQ ID NO: 101883 - DNA, 27 bp, Artificial Sequence
  Synthetic
attcctttctuacataccagtgtugct

SEQ ID NO: 101884 - DNA, 18 bp, Artificial Sequence
  Synthetic
ccgaccugtgccctucaa

SEQ ID NO: 101885 - DNA, 21 bp, Artificial Sequence
  Synthetic
acgacctucctcttccuccag

SEQ ID NO: 101886 - DNA, 20 bp, Artificial Sequence
  Synthetic
agucttgtccugggaccgaa

SEQ ID NO: 101887 - DNA, 23 bp, Artificial Sequence
  Synthetic
catctgccauggacatgcaaauc

SEQ ID NO: 101888 - DNA, 22 bp, Artificial Sequence
  Synthetic
agcaggucaccttaattuggct

SEQ ID NO: 101889 - DNA, 28 bp, Artificial Sequence
  Synthetic
tgggatcatttuggcagtaatttugaga

SEQ ID NO: 101890 - DNA, 25 bp, Artificial Sequence
  Synthetic
aaaaccacuttaccttaugccgagt

SEQ ID NO: 101891 - DNA, 28 bp, Artificial Sequence
  Synthetic
gattaattttctucagtctgtggtugct

SEQ ID NO: 101892 - DNA, 25 bp, Artificial Sequence
  Synthetic
ggcaugattttaattcucccacaca

SEQ ID NO: 101893 - DNA, 28 bp, Artificial Sequence
  Synthetic
cagacagaacaaaagutagcaguagaga

SEQ ID NO: 101894 - DNA, 24 bp, Artificial Sequence
  Synthetic
cagctcatcaaautgctggtgtuc

SEQ ID NO: 101895 - DNA, 23 bp, Artificial Sequence
  Synthetic
tgcccttggguaagcttaatucc

SEQ ID NO: 101896 - DNA, 25 bp, Artificial Sequence
  Synthetic
aatgtgatgautcttcggtaugcca

SEQ ID NO: 101897 - DNA, 22 bp, Artificial Sequence
  Synthetic
gugttcatgaucaagggcacaa

SEQ ID NO: 101898 - DNA, 24 bp, Artificial Sequence
  Synthetic
tcucagttauccagacggacagag

SEQ ID NO: 101899 - DNA, 28 bp, Artificial Sequence
  Synthetic
tggtgattucaaggaaaatgtgttgtug

SEQ ID NO: 101900 - DNA, 23 bp, Artificial Sequence
  Synthetic
catccacaaugttgttgcugagt

SEQ ID NO: 101901 - DNA, 24 bp, Artificial Sequence
  Synthetic
ttttacttggaauccaggcacugt

SEQ ID NO: 101902 - DNA, 27 bp, Artificial Sequence
  Synthetic
ccaaaaggtgcugataatttccugaaa

SEQ ID NO: 101903 - DNA, 23 bp, Artificial Sequence
  Synthetic
cattgttcctugccctttgtuct

SEQ ID NO: 101904 - DNA, 23 bp, Artificial Sequence
  Synthetic
ctttgcctuaataaacccgugct

SEQ ID NO: 101905 - DNA, 24 bp, Artificial Sequence
  Synthetic
gacctgaagcagcaautactgtug

SEQ ID NO: 101906 - DNA, 27 bp, Artificial Sequence
  Synthetic
cacccagcguacatacatttuaaaaca

SEQ ID NO: 101907 - DNA, 24 bp, Artificial Sequence
  Synthetic
attttatacuccaaggccuggcaa

SEQ ID NO: 101908 - DNA, 28 bp, Artificial Sequence
  Synthetic
gttcttttaccugccaatgtttcugaaa

SEQ ID NO: 101909 - DNA, 23 bp, Artificial Sequence
  Synthetic
cagatgatggugatgacaaugcc

SEQ ID NO: 101910 - DNA, 28 bp, Artificial Sequence
  Synthetic
agacatacttgcutgacttccauaaaca

SEQ ID NO: 101911 - DNA, 27 bp, Artificial Sequence
  Synthetic
cgaaatttaccucattggatucagcag

SEQ ID NO: 101912 - DNA, 22 bp, Artificial Sequence
  Synthetic
cagcatcgtucatggcagtaug

SEQ ID NO: 101913 - DNA, 31 bp, Artificial Sequence
  Synthetic
tcctactttagucactttcatatcagucact

SEQ ID NO: 101914 - DNA, 25 bp, Artificial Sequence
  Synthetic
tcctctttucccaggttgguaaaac

SEQ ID NO: 101915 - DNA, 27 bp, Artificial Sequence
  Synthetic
gggcttactcuctgatattctctgtua

SEQ ID NO: 101916 - DNA, 25 bp, Artificial Sequence
  Synthetic
acatggtaagagguaaaggaccugt

SEQ ID NO: 101917 - DNA, 28 bp, Artificial Sequence
  Synthetic
ggaagaaaggtucaatacggaaaactug

SEQ ID NO: 101918 - DNA, 25 bp, Artificial Sequence
  Synthetic
ctcaggaatgugctgtttactcuct

SEQ ID NO: 101919 - DNA, 28 bp, Artificial Sequence
  Synthetic
acaagcatguaagaatttctcuaaggca

SEQ ID NO: 101920 - DNA, 21 bp, Artificial Sequence
  Synthetic
ggagtttucaccccaacccut

SEQ ID NO: 101921 - DNA, 21 bp, Artificial Sequence
  Synthetic
gccccggugagttcaaagaug

SEQ ID NO: 101922 - DNA, 24 bp, Artificial Sequence
  Synthetic
cagctguacatcgactgugaaaag

SEQ ID NO: 101923 - DNA, 20 bp, Artificial Sequence
  Synthetic
cagaugaucccacggagcag

SEQ ID NO: 101924 - DNA, 21 bp, Artificial Sequence
  Synthetic
cggagacaacagcgugttuga

SEQ ID NO: 101925 - DNA, 22 bp, Artificial Sequence
  Synthetic
tggaacutgtcaucaggcacag

SEQ ID NO: 101926 - DNA, 20 bp, Artificial Sequence
  Synthetic
cagcuttccgcaucgaggat

SEQ ID NO: 101927 - DNA, 20 bp, Artificial Sequence
  Synthetic
gagtgguctttccgcuccag

SEQ ID NO: 101928 - DNA, 22 bp, Artificial Sequence
  Synthetic
agtgagtgagaugggagtguca

SEQ ID NO: 101929 - DNA, 23 bp, Artificial Sequence
  Synthetic
ggatggugaacatctuccggaac

SEQ ID NO: 101930 - DNA, 22 bp, Artificial Sequence
  Synthetic
cccugaggcagaugaagaagac

SEQ ID NO: 101931 - DNA, 22 bp, Artificial Sequence
  Synthetic
gagagcutctuccacagacacc

SEQ ID NO: 101932 - DNA, 20 bp, Artificial Sequence
  Synthetic
gccugaccguccaaggaaag

SEQ ID NO: 101933 - DNA, 22 bp, Artificial Sequence
  Synthetic
cgtccaacucagcattcuccat

SEQ ID NO: 101934 - DNA, 20 bp, Artificial Sequence
  Synthetic
aatgccacggacuacuggac

SEQ ID NO: 101935 - DNA, 23 bp, Artificial Sequence
  Synthetic
atctggctgtucaaagcaggtua

SEQ ID NO: 101936 - DNA, 26 bp, Artificial Sequence
  Synthetic
accatacacgutttggttttctguct

SEQ ID NO: 101937 - DNA, 20 bp, Artificial Sequence
  Synthetic
tgccgcucctucacaaagat

SEQ ID NO: 101938 - DNA, 19 bp, Artificial Sequence
  Synthetic
gggcgacuaccuggagaac

SEQ ID NO: 101939 - DNA, 21 bp, Artificial Sequence
  Synthetic
gcctctggucaaagctcgtut

SEQ ID NO: 101940 - DNA, 25 bp, Artificial Sequence
  Synthetic
aacagtgttgaguttaggaggcaut

SEQ ID NO: 101941 - DNA, 22 bp, Artificial Sequence
  Synthetic
tctccagaagutggacgtcuca

SEQ ID NO: 101942 - DNA, 21 bp, Artificial Sequence
  Synthetic
gagagagcugctcctugagac

SEQ ID NO: 101943 - DNA, 27 bp, Artificial Sequence
  Synthetic
ttattcttccccuatggctttgaacut

SEQ ID NO: 101944 - DNA, 28 bp, Artificial Sequence
  Synthetic
ctgcaatttacccuccatttacatcuct

SEQ ID NO: 101945 - DNA, 22 bp, Artificial Sequence
  Synthetic
ccatcttugtcatggucagcct

SEQ ID NO: 101946 - DNA, 20 bp, Artificial Sequence
  Synthetic
ctatgugcccaaugccaacc

SEQ ID NO: 101947 - DNA, 23 bp, Artificial Sequence
  Synthetic
gtcttagaaaguggctcccauga

SEQ ID NO: 101948 - DNA, 27 bp, Artificial Sequence
  Synthetic
cttttagtaatagcutccccagtgcut

SEQ ID NO: 101949 - DNA, 28 bp, Artificial Sequence
  Synthetic
gggagaatctguccttcagaatactuct

SEQ ID NO: 101950 - DNA, 23 bp, Artificial Sequence
  Synthetic
tgaatagtgggaaugccttcugg

SEQ ID NO: 101951 - DNA, 28 bp, Artificial Sequence
  Synthetic
tgacaaaggacutctgtatgtgtttuca

SEQ ID NO: 101952 - DNA, 18 bp, Artificial Sequence
  Synthetic
acggcgagautcgaccug

SEQ ID NO: 101953 - DNA, 20 bp, Artificial Sequence
  Synthetic
caaacgcaagucgtggauga

SEQ ID NO: 101954 - DNA, 21 bp, Artificial Sequence
  Synthetic
ccaccutactcauccacgact

SEQ ID NO: 101955 - DNA, 17 bp, Artificial Sequence
  Synthetic
caggcagcagccucuct

SEQ ID NO: 101956 - DNA, 25 bp, Artificial Sequence
  Synthetic
gtctaaggatugacagacacucagg

SEQ ID NO: 101957 - DNA, 24 bp, Artificial Sequence
  Synthetic
cattgcacagaacauggttucaca

SEQ ID NO: 101958 - DNA, 28 bp, Artificial Sequence
  Synthetic
gaggaagcattcugatttcacatttcuc

SEQ ID NO: 101959 - DNA, 28 bp, Artificial Sequence
  Synthetic
gccttgacauccctactatagataucca

SEQ ID NO: 101960 - DNA, 25 bp, Artificial Sequence
  Synthetic
gggcaaattaautcccacctuaact

SEQ ID NO: 101961 - DNA, 24 bp, Artificial Sequence
  Synthetic
ggaagagaucaagcacctgaaguc

SEQ ID NO: 101962 - DNA, 23 bp, Artificial Sequence
  Synthetic
cttgcagguaaatccagagcuca

SEQ ID NO: 101963 - DNA, 28 bp, Artificial Sequence
  Synthetic
gctggaaagtuccatctctgattcatua

SEQ ID NO: 101964 - DNA, 28 bp, Artificial Sequence
  Synthetic
ggacagaagagaauctatccaaacugaa

SEQ ID NO: 101965 - DNA, 20 bp, Artificial Sequence
  Synthetic
gggaugcaagagggaugacc

SEQ ID NO: 101966 - DNA, 22 bp, Artificial Sequence
  Synthetic
cggccactuacagctgacauaa

SEQ ID NO: 101967 - DNA, 33 bp, Artificial Sequence
  Synthetic
ttgttttatcaugaacatttataaucaggaagg

SEQ ID NO: 101968 - DNA, 17 bp, Artificial Sequence
  Synthetic
ggcugggtgcucaccat

SEQ ID NO: 101969 - DNA, 17 bp, Artificial Sequence
  Synthetic
cccaggcugcctuggac

SEQ ID NO: 101970 - DNA, 20 bp, Artificial Sequence
  Synthetic
ttggtggagaagutggccut

SEQ ID NO: 101971 - DNA, 17 bp, Artificial Sequence
  Synthetic
cgcuaccagcgctucct

SEQ ID NO: 101972 - DNA, 17 bp, Artificial Sequence
  Synthetic
cgcaggaagcgcuggua

SEQ ID NO: 101973 - DNA, 20 bp, Artificial Sequence
  Synthetic
cuttgccucagaccccaagt

SEQ ID NO: 101974 - DNA, 23 bp, Artificial Sequence
  Synthetic
aagtaatagugggtgctgcugac

SEQ ID NO: 101975 - DNA, 21 bp, Artificial Sequence
  Synthetic
tctcaagcucaccugggaaga

SEQ ID NO: 101976 - DNA, 25 bp, Artificial Sequence
  Synthetic
cagatctcaaagucatcctcaucct

SEQ ID NO: 101977 - DNA, 17 bp, Artificial Sequence
  Synthetic
gccauggacgcctgcuc

SEQ ID NO: 101978 - DNA, 17 bp, Artificial Sequence
  Synthetic
gggcuccucaccgaagt

SEQ ID NO: 101979 - DNA, 19 bp, Artificial Sequence
  Synthetic
cugugagcgaggaccaaga

SEQ ID NO: 101980 - DNA, 21 bp, Artificial Sequence
  Synthetic
cctctugaagtcgcuggacaa

SEQ ID NO: 101981 - DNA, 21 bp, Artificial Sequence
  Synthetic
gacactuggctttctcuccca

SEQ ID NO: 101982 - DNA, 23 bp, Artificial Sequence
  Synthetic
tgaacagtggauactctggguga

SEQ ID NO: 101983 - DNA, 22 bp, Artificial Sequence
  Synthetic
actgatgccgagugtgactcua

SEQ ID NO: 101984 - DNA, 21 bp, Artificial Sequence
  Synthetic
ggtttctcguagcctgctgua

SEQ ID NO: 101985 - DNA, 25 bp, Artificial Sequence
  Synthetic
gttgaataaagccugttacgtuccc

SEQ ID NO: 101986 - DNA, 28 bp, Artificial Sequence
  Synthetic
aaattttacaucacagccctctaagugt

SEQ ID NO: 101987 - DNA, 27 bp, Artificial Sequence
  Synthetic
ctaaagtcttggcucatggaactatug

SEQ ID NO: 101988 - DNA, 23 bp, Artificial Sequence
  Synthetic
agctttccuccaaggttgttugt

SEQ ID NO: 101989 - DNA, 21 bp, Artificial Sequence
  Synthetic
cucgagcagagtuggagaagg

SEQ ID NO: 101990 - DNA, 21 bp, Artificial Sequence
  Synthetic
agctggcutgcagaatuccat

SEQ ID NO: 101991 - DNA, 28 bp, Artificial Sequence
  Synthetic
agctcaagaaacugaggagtttacatut

SEQ ID NO: 101992 - DNA, 20 bp, Artificial Sequence
  Synthetic
ctcctgagcaauccgcagua

SEQ ID NO: 101993 - DNA, 28 bp, Artificial Sequence
  Synthetic
gagaaagcagcaucacattatgattgut

SEQ ID NO: 101994 - DNA, 23 bp, Artificial Sequence
  Synthetic
ttctttaccugacctuggcaaca

SEQ ID NO: 101995 - DNA, 24 bp, Artificial Sequence
  Synthetic
atgagtcttucaaggacacagcuc

SEQ ID NO: 101996 - DNA, 25 bp, Artificial Sequence
  Synthetic
gggctatttuaaatgccacaauggt

SEQ ID NO: 101997 - DNA, 28 bp, Artificial Sequence
  Synthetic
cccaagagactaaugagcaatacacaua

SEQ ID NO: 101998 - DNA, 28 bp, Artificial Sequence
  Synthetic
tcattaaactgtgutttcagctcctcut

SEQ ID NO: 101999 - DNA, 21 bp, Artificial Sequence
  Synthetic
ctccaguccatcctgtcugag

SEQ ID NO: 102000 - DNA, 26 bp, Artificial Sequence
  Synthetic
catccttgaauaacgctttguccaaa

SEQ ID NO: 102001 - DNA, 23 bp, Artificial Sequence
  Synthetic
gugaaaacagacauggagagcac

SEQ ID NO: 102002 - DNA, 27 bp, Artificial Sequence
  Synthetic
caggtgattatcutacatccagccaut

SEQ ID NO: 102003 - DNA, 29 bp, Artificial Sequence
  Synthetic
tgccaagaacaaaaugaatuacaaacaga

SEQ ID NO: 102004 - DNA, 28 bp, Artificial Sequence
  Synthetic
gataacaagtgttutcctttgctgguaa

SEQ ID NO: 102005 - DNA, 31 bp, Artificial Sequence
  Synthetic
atggttttaaacucatgacttatcacugact

SEQ ID NO: 102006 - DNA, 22 bp, Artificial Sequence
  Synthetic
tgtaactgcugacatccuccct

SEQ ID NO: 102007 - DNA, 21 bp, Artificial Sequence
  Synthetic
catgcgcuttgcattguccat

SEQ ID NO: 102008 - DNA, 21 bp, Artificial Sequence
  Synthetic
agggctcucgtgtgatctuct

SEQ ID NO: 102009 - DNA, 27 bp, Artificial Sequence
  Synthetic
ccaatggaaugactatguagagaggaa

SEQ ID NO: 102010 - DNA, 17 bp, Artificial Sequence
  Synthetic
ggccaggucagcaucca

SEQ ID NO: 102011 - DNA, 18 bp, Artificial Sequence
  Synthetic
ctgucggcccaggacauc

SEQ ID NO: 102012 - DNA, 22 bp, Artificial Sequence
  Synthetic
ctgtgtggaugaagctgttcug

SEQ ID NO: 102013 - DNA, 20 bp, Artificial Sequence
  Synthetic
gttcaccgugccatctcugt

SEQ ID NO: 102014 - DNA, 22 bp, Artificial Sequence
  Synthetic
gatgccctugtttggtgaucag

SEQ ID NO: 102015 - DNA, 26 bp, Artificial Sequence
  Synthetic
atgccaugaccaaagtattcttcugt

SEQ ID NO: 102016 - DNA, 21 bp, Artificial Sequence
  Synthetic
atccactgcuccaactggtut

SEQ ID NO: 102017 - DNA, 29 bp, Artificial Sequence
  Synthetic
ctttgtgattggtuttcagtagagatguc

SEQ ID NO: 102018 - DNA, 24 bp, Artificial Sequence
  Synthetic
gctgaagtucctaaagtgtcucct

SEQ ID NO: 102019 - DNA, 24 bp, Artificial Sequence
  Synthetic
cgatgguggtcagaaacucagaaa

SEQ ID NO: 102020 - DNA, 27 bp, Artificial Sequence
  Synthetic
agcauaaccaccaauagaaaacaggaa

SEQ ID NO: 102021 - DNA, 22 bp, Artificial Sequence
  Synthetic
ggaacagtucagtgcccttcug

SEQ ID NO: 102022 - DNA, 19 bp, Artificial Sequence
  Synthetic
tutcgacucacgcccaaca

SEQ ID NO: 102023 - DNA, 20 bp, Artificial Sequence
  Synthetic
gauaggacgacguggagacc

SEQ ID NO: 102024 - DNA, 21 bp, Artificial Sequence
  Synthetic
gttaactgcugagcccaggut

SEQ ID NO: 102025 - DNA, 24 bp, Artificial Sequence
  Synthetic
agacagugtatuccaaacgcagag

SEQ ID NO: 102026 - DNA, 22 bp, Artificial Sequence
  Synthetic
gcugaccaggttcuccaaacag

SEQ ID NO: 102027 - DNA, 20 bp, Artificial Sequence
  Synthetic
ctggcucccgaagugaaaca

SEQ ID NO: 102028 - DNA, 20 bp, Artificial Sequence
  Synthetic
acccacuggcagttgtgtuc

SEQ ID NO: 102029 - DNA, 27 bp, Artificial Sequence
  Synthetic
ctcttcagtuaccatggtgatatucca

SEQ ID NO: 102030 - DNA, 25 bp, Artificial Sequence
  Synthetic
acatcaguatcacacucacacacag

SEQ ID NO: 102031 - DNA, 21 bp, Artificial Sequence
  Synthetic
ctacgagccucagcucaacag

SEQ ID NO: 102032 - DNA, 26 bp, Artificial Sequence
  Synthetic
tgcactuacccacaaatacaatguga

SEQ ID NO: 102033 - DNA, 22 bp, Artificial Sequence
  Synthetic
catgcacagugtcuggaaggaa

SEQ ID NO: 102034 - DNA, 25 bp, Artificial Sequence
  Synthetic
tgctgagataaaugtcccaggatug

SEQ ID NO: 102035 - DNA, 26 bp, Artificial Sequence
  Synthetic
tcagtttgtuaccactggagaatcug

SEQ ID NO: 102036 - DNA, 23 bp, Artificial Sequence
  Synthetic
agctgcugagctttctcttucag

SEQ ID NO: 102037 - DNA, 22 bp, Artificial Sequence
  Synthetic
atttccaugttctcugggccaa

SEQ ID NO: 102038 - DNA, 21 bp, Artificial Sequence
  Synthetic
gcccauggacagtggaaacua

SEQ ID NO: 102039 - DNA, 22 bp, Artificial Sequence
  Synthetic
gagaaaaccggaaaugaugcca

SEQ ID NO: 102040 - DNA, 27 bp, Artificial Sequence
  Synthetic
tttgtgtcaacutggctttaatucgag

SEQ ID NO: 102041 - DNA, 28 bp, Artificial Sequence
  Synthetic
ctcagcctacautgtcatttttcttgut

SEQ ID NO: 102042 - DNA, 22 bp, Artificial Sequence
  Synthetic
cctgttccccuctcactctcut

SEQ ID NO: 102043 - DNA, 28 bp, Artificial Sequence
  Synthetic
tcactgaagaauagctatgccattugag

SEQ ID NO: 102044 - DNA, 20 bp, Artificial Sequence
  Synthetic
ggtggtcautgacctgcuca

SEQ ID NO: 102045 - DNA, 24 bp, Artificial Sequence
  Synthetic
gatctctcccutgtctcctctcut

SEQ ID NO: 102046 - DNA, 22 bp, Artificial Sequence
  Synthetic
ctggcagaaagcagcuttgaug

SEQ ID NO: 102047 - DNA, 21 bp, Artificial Sequence
  Synthetic
cacguaggagaatgggtuggg

SEQ ID NO: 102048 - DNA, 20 bp, Artificial Sequence
  Synthetic
gaaccucuggcaggagcaaa

SEQ ID NO: 102049 - DNA, 19 bp, Artificial Sequence
  Synthetic
caagcatgcucagccagug

SEQ ID NO: 102050 - DNA, 27 bp, Artificial Sequence
  Synthetic
ggaattgtctugatttctctcccugaa

SEQ ID NO: 102051 - DNA, 24 bp, Artificial Sequence
  Synthetic
cacctttctcauacaggcttcucc

SEQ ID NO: 102052 - DNA, 25 bp, Artificial Sequence
  Synthetic
gaagatactgutgatcccaguggat

SEQ ID NO: 102053 - DNA, 20 bp, Artificial Sequence
  Synthetic
gaatggcacaggguacguct

SEQ ID NO: 102054 - DNA, 22 bp, Artificial Sequence
  Synthetic
ctggaauttgaggcuacccagt

SEQ ID NO: 102055 - DNA, 22 bp, Artificial Sequence
  Synthetic
ggaauaaaccacgucgcacaga

SEQ ID NO: 102056 - DNA, 23 bp, Artificial Sequence
  Synthetic
tccaccaauagtgagcuccaaga

SEQ ID NO: 102057 - DNA, 27 bp, Artificial Sequence
  Synthetic
gcataaagcctuttaggcatacacugt

SEQ ID NO: 102058 - DNA, 23 bp, Artificial Sequence
  Synthetic
agcctacttaccuctgacgtgut

SEQ ID NO: 102059 - DNA, 24 bp, Artificial Sequence
  Synthetic
cttttccaacucctcctcctgtuc

SEQ ID NO: 102060 - DNA, 23 bp, Artificial Sequence
  Synthetic
agacggagcautttacacctuga

SEQ ID NO: 102061 - DNA, 25 bp, Artificial Sequence
  Synthetic
agacaaaagcauagcagagtcctut

SEQ ID NO: 102062 - DNA, 24 bp, Artificial Sequence
  Synthetic
gctcattgccutttcacagaacut

SEQ ID NO: 102063 - DNA, 25 bp, Artificial Sequence
  Synthetic
aagucacttcuaaacagccagacag

SEQ ID NO: 102064 - DNA, 23 bp, Artificial Sequence
  Synthetic
gcagaugtgcuaagagaggagga

SEQ ID NO: 102065 - DNA, 25 bp, Artificial Sequence
  Synthetic
gctgtcaactuagactgtgctttut

SEQ ID NO: 102066 - DNA, 28 bp, Artificial Sequence
  Synthetic
agcgtgugatcaaaacauacaagaaaat

SEQ ID NO: 102067 - DNA, 20 bp, Artificial Sequence
  Synthetic
gaaaggguccgtcagcauga

SEQ ID NO: 102068 - DNA, 21 bp, Artificial Sequence
  Synthetic
aacccugttgccaugacagaa

SEQ ID NO: 102069 - DNA, 24 bp, Artificial Sequence
  Synthetic
cacttcctgccuggtatctctuac

SEQ ID NO: 102070 - DNA, 22 bp, Artificial Sequence
  Synthetic
caggaccuattgagctcugcat

SEQ ID NO: 102071 - DNA, 26 bp, Artificial Sequence
  Synthetic
tgtaaaagucccactccaauacacac

SEQ ID NO: 102072 - DNA, 22 bp, Artificial Sequence
  Synthetic
gggcutggtgttuagaagaaca

SEQ ID NO: 102073 - DNA, 28 bp, Artificial Sequence
  Synthetic
ccctgttgctugggataataatacucat

SEQ ID NO: 102074 - DNA, 27 bp, Artificial Sequence
  Synthetic
tgaaagatccauggaatctctccaaug

SEQ ID NO: 102075 - DNA, 24 bp, Artificial Sequence
  Synthetic
cccauatcctccgucagaacaaag

SEQ ID NO: 102076 - DNA, 27 bp, Artificial Sequence
  Synthetic
ctctgttactattucctccttgcacut

SEQ ID NO: 102077 - DNA, 25 bp, Artificial Sequence
  Synthetic
ctgagcaucccaaatgatattgucc

SEQ ID NO: 102078 - DNA, 21 bp, Artificial Sequence
  Synthetic
tctggtatauggacgcuggga

SEQ ID NO: 102079 - DNA, 28 bp, Artificial Sequence
  Synthetic
gttgacatuaacagcaagtttucaaagg

SEQ ID NO: 102080 - DNA, 21 bp, Artificial Sequence
  Synthetic
ggaatuccaggtacacuccct

SEQ ID NO: 102081 - DNA, 24 bp, Artificial Sequence
  Synthetic
gcatcaccaautccatccttguca

SEQ ID NO: 102082 - DNA, 22 bp, Artificial Sequence
  Synthetic
ccaacucagggcaggaagacua

SEQ ID NO: 102083 - DNA, 27 bp, Artificial Sequence
  Synthetic
gctgaacugaaaagaugaaaaagggat

SEQ ID NO: 102084 - DNA, 27 bp, Artificial Sequence
  Synthetic
actgtagtttctutgtgtcttggtugt

SEQ ID NO: 102085 - DNA, 21 bp, Artificial Sequence
  Synthetic
gttgtccuccaggctcaucat

SEQ ID NO: 102086 - DNA, 23 bp, Artificial Sequence
  Synthetic
cgtgggaagugatcaaatgctuc

SEQ ID NO: 102087 - DNA, 22 bp, Artificial Sequence
  Synthetic
tgcagccccaautccuaaaaca

SEQ ID NO: 102088 - DNA, 21 bp, Artificial Sequence
  Synthetic
tgcttaugacccgatccucct

SEQ ID NO: 102089 - DNA, 21 bp, Artificial Sequence
  Synthetic
gcttgccugccttguaccaat

SEQ ID NO: 102090 - DNA, 22 bp, Artificial Sequence
  Synthetic
cacagctguagtcttcctcuga

SEQ ID NO: 102091 - DNA, 20 bp, Artificial Sequence
  Synthetic
cagguccacaaaagguggct

SEQ ID NO: 102092 - DNA, 21 bp, Artificial Sequence
  Synthetic
gcucagaaagggaggaaucgg

SEQ ID NO: 102093 - DNA, 21 bp, Artificial Sequence
  Synthetic
cccuttagctuccaggaaggt

SEQ ID NO: 102094 - DNA, 23 bp, Artificial Sequence
  Synthetic
ccttccucacacttcctugaact

SEQ ID NO: 102095 - DNA, 23 bp, Artificial Sequence
  Synthetic
tgtttctgctcuctgcttcctut

SEQ ID NO: 102096 - DNA, 21 bp, Artificial Sequence
  Synthetic
cgactcgugctgtccctttut

SEQ ID NO: 102097 - DNA, 20 bp, Artificial Sequence
  Synthetic
ccuacuccccacaacccaga

SEQ ID NO: 102098 - DNA, 22 bp, Artificial Sequence
  Synthetic
tgcaaaagaugggaaaccugga

SEQ ID NO: 102099 - DNA, 26 bp, Artificial Sequence
  Synthetic
gcggatgccuttccattgattttaut

SEQ ID NO: 102100 - DNA, 23 bp, Artificial Sequence
  Synthetic
ggaaaccutgaccagugaccaat

SEQ ID NO: 102101 - DNA, 21 bp, Artificial Sequence
  Synthetic
tgtttgacaucctccccaucc

SEQ ID NO: 102102 - DNA, 23 bp, Artificial Sequence
  Synthetic
cagctgcatugggaggatgauat

SEQ ID NO: 102103 - DNA, 20 bp, Artificial Sequence
  Synthetic
gcuagacacagcuggcacag

SEQ ID NO: 102104 - DNA, 21 bp, Artificial Sequence
  Synthetic
actggugaagccaucccaaag

SEQ ID NO: 102105 - DNA, 24 bp, Artificial Sequence
  Synthetic
gaagacuacaacagtgagcuccaa

SEQ ID NO: 102106 - DNA, 20 bp, Artificial Sequence
  Synthetic
agcagccacutttcgaccuc

SEQ ID NO: 102107 - DNA, 26 bp, Artificial Sequence
  Synthetic
gtgagttgcacugggtttttgtaaua

SEQ ID NO: 102108 - DNA, 28 bp, Artificial Sequence
  Synthetic
tttcaggagttuactacctgcttaaugg

SEQ ID NO: 102109 - DNA, 25 bp, Artificial Sequence
  Synthetic
tgtctcagaugtaccagagttugga

SEQ ID NO: 102110 - DNA, 21 bp, Artificial Sequence
  Synthetic
ggctgacgugcttctgaagut

SEQ ID NO: 102111 - DNA, 26 bp, Artificial Sequence
  Synthetic
gggaaaatccauttagatgtacuggt

SEQ ID NO: 102112 - DNA, 25 bp, Artificial Sequence
  Synthetic
attgcacagutataatcccucagca

SEQ ID NO: 102113 - DNA, 28 bp, Artificial Sequence
  Synthetic
gtaccaagcagaaacuactacagaaugt

SEQ ID NO: 102114 - DNA, 23 bp, Artificial Sequence
  Synthetic
cttgctctugttcctgtuccaga

SEQ ID NO: 102115 - DNA, 24 bp, Artificial Sequence
  Synthetic
cctgatgtgtuatcccaggagtug

SEQ ID NO: 102116 - DNA, 28 bp, Artificial Sequence
  Synthetic
aagtagatuagcagattttctgugcact

SEQ ID NO: 102117 - DNA, 28 bp, Artificial Sequence
  Synthetic
cctctgactttugctcctgttcatatua

SEQ ID NO: 102118 - DNA, 23 bp, Artificial Sequence
  Synthetic
gatgatttcuccccttccauccc

SEQ ID NO: 102119 - DNA, 21 bp, Artificial Sequence
  Synthetic
gccagguctgguacacacaat

SEQ ID NO: 102120 - DNA, 23 bp, Artificial Sequence
  Synthetic
gggcagttcutttgtgtgttuca

SEQ ID NO: 102121 - DNA, 21 bp, Artificial Sequence
  Synthetic
ggtccttcaugtgctgctugt

SEQ ID NO: 102122 - DNA, 20 bp, Artificial Sequence
  Synthetic
ccctagggcugaacatgcut

SEQ ID NO: 102123 - DNA, 22 bp, Artificial Sequence
  Synthetic
ccttggcugaccaatgtcugag

SEQ ID NO: 102124 - DNA, 21 bp, Artificial Sequence
  Synthetic
cttggtgtcugcactcaaugg

SEQ ID NO: 102125 - DNA, 21 bp, Artificial Sequence
  Synthetic
cagccagcuaacaaccucact

SEQ ID NO: 102126 - DNA, 28 bp, Artificial Sequence
  Synthetic
aataaacttgcugatctttcctcucaca

SEQ ID NO: 102127 - DNA, 22 bp, Artificial Sequence
  Synthetic
ctgtgttgtuaccctgtcugct

SEQ ID NO: 102128 - DNA, 22 bp, Artificial Sequence
  Synthetic
tcttatgggcutccgtugcaaa

SEQ ID NO: 102129 - DNA, 22 bp, Artificial Sequence
  Synthetic
gctttcacgaugttccctccuc

SEQ ID NO: 102130 - DNA, 20 bp, Artificial Sequence
  Synthetic
caagtggccgugacagttuc

SEQ ID NO: 102131 - DNA, 23 bp, Artificial Sequence
  Synthetic
gatgctcuggcagtgtugaaaaa

SEQ ID NO: 102132 - DNA, 21 bp, Artificial Sequence
  Synthetic
ggaagcagucctcagccttuc

SEQ ID NO: 102133 - DNA, 27 bp, Artificial Sequence
  Synthetic
gaatcaataacuctctcttccctucca

SEQ ID NO: 102134 - DNA, 28 bp, Artificial Sequence
  Synthetic
tctctaagccuttaaaaacacactuggt

SEQ ID NO: 102135 - DNA, 28 bp, Artificial Sequence
  Synthetic
ccaatgaagaguttcaagcatttcugaa

SEQ ID NO: 102136 - DNA, 25 bp, Artificial Sequence
  Synthetic
agcctgcttauctttaaggcatugt

SEQ ID NO: 102137 - DNA, 23 bp, Artificial Sequence
  Synthetic
agagcaaacutgatgcagugact

SEQ ID NO: 102138 - DNA, 23 bp, Artificial Sequence
  Synthetic
cctctttcuggtcttggaaugct

SEQ ID NO: 102139 - DNA, 23 bp, Artificial Sequence
  Synthetic
ccatctgaaaaucgggagctcug

SEQ ID NO: 102140 - DNA, 28 bp, Artificial Sequence
  Synthetic
aatgtgcatacaaaguttgtccttctug

SEQ ID NO: 102141 - DNA, 28 bp, Artificial Sequence
  Synthetic
acttcagcucacaattgtaatgcauagt

SEQ ID NO: 102142 - DNA, 21 bp, Artificial Sequence
  Synthetic
ctctgcaggaaguccttugct

SEQ ID NO: 102143 - DNA, 27 bp, Artificial Sequence
  Synthetic
cctcaatgatgcucttcaaaatgcuaa

SEQ ID NO: 102144 - DNA, 20 bp, Artificial Sequence
  Synthetic
gagacccgugggtttgtuct

SEQ ID NO: 102145 - DNA, 24 bp, Artificial Sequence
  Synthetic
gaggattttggcauctggtgatut

SEQ ID NO: 102146 - DNA, 21 bp, Artificial Sequence
  Synthetic
acggcagcagautctaaugct

SEQ ID NO: 102147 - DNA, 21 bp, Artificial Sequence
  Synthetic
gcagaautccuccagagccat

SEQ ID NO: 102148 - DNA, 22 bp, Artificial Sequence
  Synthetic
catcctgacauccctcaucgaa

SEQ ID NO: 102149 - DNA, 20 bp, Artificial Sequence
  Synthetic
gggagaucacauggcacacc

SEQ ID NO: 102150 - DNA, 19 bp, Artificial Sequence
  Synthetic
cctcagcuggcggagaaug

SEQ ID NO: 102151 - DNA, 19 bp, Artificial Sequence
  Synthetic
ctgaggaccuccaccucct

SEQ ID NO: 102152 - DNA, 21 bp, Artificial Sequence
  Synthetic
ctccctgccuagctgatcuct

SEQ ID NO: 102153 - DNA, 23 bp, Artificial Sequence
  Synthetic
cctaaaggugccacacaaacuca

SEQ ID NO: 102154 - DNA, 27 bp, Artificial Sequence
  Synthetic
cccatcaaaatgucaagtgctttguaa

SEQ ID NO: 102155 - DNA, 21 bp, Artificial Sequence
  Synthetic
tggagtcucagccacctcuac

SEQ ID NO: 102156 - DNA, 23 bp, Artificial Sequence
  Synthetic
gttctucaacgtcauccaaccaa

SEQ ID NO: 102157 - DNA, 28 bp, Artificial Sequence
  Synthetic
cccatcctgatauttttcctggatttuc

SEQ ID NO: 102158 - DNA, 23 bp, Artificial Sequence
  Synthetic
agctggcttuctgtgagcaauat

SEQ ID NO: 102159 - DNA, 26 bp, Artificial Sequence
  Synthetic
ggacutgctttgatucagaacaagaa

SEQ ID NO: 102160 - DNA, 25 bp, Artificial Sequence
  Synthetic
catgacaatgcuagagacgtctuct

SEQ ID NO: 102161 - DNA, 26 bp, Artificial Sequence
  Synthetic
caccccagagutccataauagaacaa

SEQ ID NO: 102162 - DNA, 28 bp, Artificial Sequence
  Synthetic
acctgtttacaaauaagcagaguggaaa

SEQ ID NO: 102163 - DNA, 21 bp, Artificial Sequence
  Synthetic
aaggagcugatttcugcggat

SEQ ID NO: 102164 - DNA, 23 bp, Artificial Sequence
  Synthetic
gaagcauattcctuccgagcaag

SEQ ID NO: 102165 - DNA, 26 bp, Artificial Sequence
  Synthetic
cagaccatatuaccatcgctgaauga

SEQ ID NO: 102166 - DNA, 21 bp, Artificial Sequence
  Synthetic
acttccugccagggagtgaua

SEQ ID NO: 102167 - DNA, 27 bp, Artificial Sequence
  Synthetic
agagggutagcttatuagaagacacca

SEQ ID NO: 102168 - DNA, 21 bp, Artificial Sequence
  Synthetic
ctcagcgaggcugtgttcuaa

SEQ ID NO: 102169 - DNA, 28 bp, Artificial Sequence
  Synthetic
acatccaagaggaaaucagaaaaaucca

SEQ ID NO: 102170 - DNA, 21 bp, Artificial Sequence
  Synthetic
tcagcguaaagcagguacaca

SEQ ID NO: 102171 - DNA, 21 bp, Artificial Sequence
  Synthetic
gagagcccugcatgauaagca

SEQ ID NO: 102172 - DNA, 22 bp, Artificial Sequence
  Synthetic
gctggctugtgcactctuacat

SEQ ID NO: 102173 - DNA, 22 bp, Artificial Sequence
  Synthetic
caaagccutguccgagaaaacc

SEQ ID NO: 102174 - DNA, 24 bp, Artificial Sequence
  Synthetic
tcactgagguaggaatgaucgact

SEQ ID NO: 102175 - DNA, 27 bp, Artificial Sequence
  Synthetic
cctaatgaaugagagttctgagctuca

SEQ ID NO: 102176 - DNA, 28 bp, Artificial Sequence
  Synthetic
gaatgttttggtauttagccagttgugt

SEQ ID NO: 102177 - DNA, 29 bp, Artificial Sequence
  Synthetic
cggttacaagaacuagagaagaattuggt

SEQ ID NO: 102178 - DNA, 22 bp, Artificial Sequence
  Synthetic
tcgtgttctuggtaagcacugg

SEQ ID NO: 102179 - DNA, 23 bp, Artificial Sequence
  Synthetic
cgguggatgaacugaaccagaaa

SEQ ID NO: 102180 - DNA, 21 bp, Artificial Sequence
  Synthetic
gaacccucacctgcatgtuga

SEQ ID NO: 102181 - DNA, 24 bp, Artificial Sequence
  Synthetic
tggctttaucagaactgtcagucc

SEQ ID NO: 102182 - DNA, 22 bp, Artificial Sequence
  Synthetic
cagctttcuggcctccaauaga

SEQ ID NO: 102183 - DNA, 22 bp, Artificial Sequence
  Synthetic
tgcuttcactaucgccgaaaca

SEQ ID NO: 102184 - DNA, 25 bp, Artificial Sequence
  Synthetic
ccagtggcaagcuttatcaaaauct

SEQ ID NO: 102185 - DNA, 22 bp, Artificial Sequence
  Synthetic
gcaggaaaagagugaagtgcug

SEQ ID NO: 102186 - DNA, 22 bp, Artificial Sequence
  Synthetic
ggaacacugccatgagaaacug

SEQ ID NO: 102187 - DNA, 21 bp, Artificial Sequence
  Synthetic
tuggtctcaaugagcgacagg

SEQ ID NO: 102188 - DNA, 26 bp, Artificial Sequence
  Synthetic
ggcaatattucaggatgatgtcucca

SEQ ID NO: 102189 - DNA, 22 bp, Artificial Sequence
  Synthetic
gctcctuagaagctgugcaagt

SEQ ID NO: 102190 - DNA, 24 bp, Artificial Sequence
  Synthetic
cttacctgaagautgtccaccuga

SEQ ID NO: 102191 - DNA, 23 bp, Artificial Sequence
  Synthetic
tgctgaaaucagtgctugaccaa

SEQ ID NO: 102192 - DNA, 21 bp, Artificial Sequence
  Synthetic
cagtcttgggauccccagtuc

SEQ ID NO: 102193 - DNA, 25 bp, Artificial Sequence
  Synthetic
gcctttcatucagttattcaugcca

SEQ ID NO: 102194 - DNA, 21 bp, Artificial Sequence
  Synthetic
ccagcagcaggutctcatugt

SEQ ID NO: 102195 - DNA, 22 bp, Artificial Sequence
  Synthetic
ctgugggaaacagtcttugcag

SEQ ID NO: 102196 - DNA, 24 bp, Artificial Sequence
  Synthetic
gactggaccucttcctgatgaaut

SEQ ID NO: 102197 - DNA, 25 bp, Artificial Sequence
  Synthetic
cgaatggugcagagtatagactucc

SEQ ID NO: 102198 - DNA, 21 bp, Artificial Sequence
  Synthetic
ggccactutgtgactacucca

SEQ ID NO: 102199 - DNA, 28 bp, Artificial Sequence
  Synthetic
ctgaaaccctgaugaagttcttagaugt

SEQ ID NO: 102200 - DNA, 22 bp, Artificial Sequence
  Synthetic
tctgcaatucctgaagctuccc

SEQ ID NO: 102201 - DNA, 27 bp, Artificial Sequence
  Synthetic
agatgatgugagcaaacaagucaaaac

SEQ ID NO: 102202 - DNA, 20 bp, Artificial Sequence
  Synthetic
gtccaccaautccggucgaa

SEQ ID NO: 102203 - DNA, 29 bp, Artificial Sequence
  Synthetic
tgcttgtatctatucagaatgtgacauca

SEQ ID NO: 102204 - DNA, 23 bp, Artificial Sequence
  Synthetic
tgtttgggtcugtgtggaaauca

SEQ ID NO: 102205 - DNA, 24 bp, Artificial Sequence
  Synthetic
gcagcaaugaagtcagcauacaac

SEQ ID NO: 102206 - DNA, 22 bp, Artificial Sequence
  Synthetic
ctgtgcugcgaaaaccttctut

SEQ ID NO: 102207 - DNA, 25 bp, Artificial Sequence
  Synthetic
gtgaactugaagcccaattctugag

SEQ ID NO: 102208 - DNA, 26 bp, Artificial Sequence
  Synthetic
aggcaacauaagcttuacaacaagga

SEQ ID NO: 102209 - DNA, 28 bp, Artificial Sequence
  Synthetic
acctgacataaaagucaatgacctuacc

SEQ ID NO: 102210 - DNA, 23 bp, Artificial Sequence
  Synthetic
atcagagagagccutctggauga

SEQ ID NO: 102211 - DNA, 20 bp, Artificial Sequence
  Synthetic
gcagagcccucctccagaua

SEQ ID NO: 102212 - DNA, 21 bp, Artificial Sequence
  Synthetic
tcggtgggaacuttgctcauc

SEQ ID NO: 102213 - DNA, 29 bp, Artificial Sequence
  Synthetic
acaagttctataaaguccaggaagcaaut

SEQ ID NO: 102214 - DNA, 21 bp, Artificial Sequence
  Synthetic
gggagcgacucatctcaguct

SEQ ID NO: 102215 - DNA, 21 bp, Artificial Sequence
  Synthetic
cacctugaccccttggctuat

SEQ ID NO: 102216 - DNA, 22 bp, Artificial Sequence
  Synthetic
gtgtgctggugattgagcttut

SEQ ID NO: 102217 - DNA, 21 bp, Artificial Sequence
  Synthetic
tccttcauggcagtccagtug

SEQ ID NO: 102218 - DNA, 21 bp, Artificial Sequence
  Synthetic
ccaugagaaggttcugagcca

SEQ ID NO: 102219 - DNA, 28 bp, Artificial Sequence
  Synthetic
aggacctcautaaaaggaaaauccaagt

SEQ ID NO: 102220 - DNA, 20 bp, Artificial Sequence
  Synthetic
cacaucaacccctaccucgt

SEQ ID NO: 102221 - DNA, 27 bp, Artificial Sequence
  Synthetic
ccaaaatgcttgutctaagggaaauct

SEQ ID NO: 102222 - DNA, 21 bp, Artificial Sequence
  Synthetic
tggatctgaugcctggcttuc

SEQ ID NO: 102223 - DNA, 23 bp, Artificial Sequence
  Synthetic
ccugcagaggagaagcucaaaat

SEQ ID NO: 102224 - DNA, 21 bp, Artificial Sequence
  Synthetic
gccaccaugatctccctcuga

SEQ ID NO: 102225 - DNA, 27 bp, Artificial Sequence
  Synthetic
tcaacattaacuccaccgatatagcug

SEQ ID NO: 102226 - DNA, 23 bp, Artificial Sequence
  Synthetic
ccatcagctauatcggtggagut

SEQ ID NO: 102227 - DNA, 27 bp, Artificial Sequence
  Synthetic
ttactcccaugtactattacauaggca

SEQ ID NO: 102228 - DNA, 23 bp, Artificial Sequence
  Synthetic
tgcutaattactucaggcaccga

SEQ ID NO: 102229 - DNA, 22 bp, Artificial Sequence
  Synthetic
aataccacgacacgutcgtuct

SEQ ID NO: 102230 - DNA, 22 bp, Artificial Sequence
  Synthetic
gcuctccccugcaaaacagaat

SEQ ID NO: 102231 - DNA, 25 bp, Artificial Sequence
  Synthetic
ttgatctacttuatcgcctgcucac

SEQ ID NO: 102232 - DNA, 17 bp, Artificial Sequence
  Synthetic
cccaaggccgacugcug

SEQ ID NO: 102233 - DNA, 27 bp, Artificial Sequence
  Synthetic
aggttaaaaaggccacugaaatgatug

SEQ ID NO: 102234 - DNA, 25 bp, Artificial Sequence
  Synthetic
ccaggtaactuatcttgcagcugat

SEQ ID NO: 102235 - DNA, 26 bp, Artificial Sequence
  Synthetic
gtggcttttaugggagttaccctaut

SEQ ID NO: 102236 - DNA, 25 bp, Artificial Sequence
  Synthetic
tggcagaguaaccagattaguagca

SEQ ID NO: 102237 - DNA, 22 bp, Artificial Sequence
  Synthetic
cucaaacggacaucaccaacag

SEQ ID NO: 102238 - DNA, 26 bp, Artificial Sequence
  Synthetic
acatttcucccaacaatcacaguagg

SEQ ID NO: 102239 - DNA, 28 bp, Artificial Sequence
  Synthetic
tctctggtttcagugagttatacctuca

SEQ ID NO: 102240 - DNA, 25 bp, Artificial Sequence
  Synthetic
gtaacccaacaaagguggtgaaaut

SEQ ID NO: 102241 - DNA, 28 bp, Artificial Sequence
  Synthetic
caccttacgtauggtctctaaatccaut

SEQ ID NO: 102242 - DNA, 21 bp, Artificial Sequence
  Synthetic
aaggaagctuaaggcggtugt

SEQ ID NO: 102243 - DNA, 23 bp, Artificial Sequence
  Synthetic
ggaggcaucaacttgcaaucaat

SEQ ID NO: 102244 - DNA, 28 bp, Artificial Sequence
  Synthetic
gccatttcaucacccagttaauaagaaa

SEQ ID NO: 102245 - DNA, 25 bp, Artificial Sequence
  Synthetic
tgatgaaaagaaucaggcacucaga

SEQ ID NO: 102246 - DNA, 28 bp, Artificial Sequence
  Synthetic
agatgactaugatgctgattgugaagac

SEQ ID NO: 102247 - DNA, 27 bp, Artificial Sequence
  Synthetic
gctcctcagacaaaaguagacaatcuc

SEQ ID NO: 102248 - DNA, 29 bp, Artificial Sequence
  Synthetic
tttcttaacactcucctatccctguaact

SEQ ID NO: 102249 - DNA, 26 bp, Artificial Sequence
  Synthetic
agtctctgcuggacaatttgaaagua

SEQ ID NO: 102250 - DNA, 25 bp, Artificial Sequence
  Synthetic
tgtacacacacgutcatctcttuca

SEQ ID NO: 102251 - DNA, 28 bp, Artificial Sequence
  Synthetic
gcatttgcaautgacctgtguaaagaag

SEQ ID NO: 102252 - DNA, 23 bp, Artificial Sequence
  Synthetic
tcacacaagaggacugacccuat

SEQ ID NO: 102253 - DNA, 28 bp, Artificial Sequence
  Synthetic
aagaacagaaggagaaguacttagguct

SEQ ID NO: 102254 - DNA, 29 bp, Artificial Sequence
  Synthetic
aagggagagtucagaaggtaatatgguat

SEQ ID NO: 102255 - DNA, 25 bp, Artificial Sequence
  Synthetic
gccttgtctauaacagtcccctuag

SEQ ID NO: 102256 - DNA, 21 bp, Artificial Sequence
  Synthetic
gctttacctgucctccaccut

SEQ ID NO: 102257 - DNA, 28 bp, Artificial Sequence
  Synthetic
tttttaggtcaautggcatgatttugct

SEQ ID NO: 102258 - DNA, 23 bp, Artificial Sequence
  Synthetic
gatggugaaaggaatgcuccagt

SEQ ID NO: 102259 - DNA, 20 bp, Artificial Sequence
  Synthetic
gacaagacaggcuggacgua

SEQ ID NO: 102260 - DNA, 26 bp, Artificial Sequence
  Synthetic
ggagcacaucgggaaagatgaaaaua

SEQ ID NO: 102261 - DNA, 24 bp, Artificial Sequence
  Synthetic
gtggccgauctttactttuccaga

SEQ ID NO: 102262 - DNA, 27 bp, Artificial Sequence
  Synthetic
ttcctctagcaaauaatgacccugaac

SEQ ID NO: 102263 - DNA, 28 bp, Artificial Sequence
  Synthetic
tcagattctcugagttctcatctuggat

SEQ ID NO: 102264 - DNA, 24 bp, Artificial Sequence
  Synthetic
tgagaaaaacaugacggtgaucca

SEQ ID NO: 102265 - DNA, 28 bp, Artificial Sequence
  Synthetic
acaaggcaaauccagaagtgtcattaut

SEQ ID NO: 102266 - DNA, 28 bp, Artificial Sequence
  Synthetic
tgatccccttuaattgtgtctcattugt

SEQ ID NO: 102267 - DNA, 33 bp, Artificial Sequence
  Synthetic
acttaattgttaaatutccatgagtgaatucaa

SEQ ID NO: 102268 - DNA, 24 bp, Artificial Sequence
  Synthetic
ggcaggttttuatttaccgcctut

SEQ ID NO: 102269 - DNA, 28 bp, Artificial Sequence
  Synthetic
agacaaauaactagucacaacagacgac

SEQ ID NO: 102270 - DNA, 29 bp, Artificial Sequence
  Synthetic
tcacatcaagattugttctctgaagtuct

SEQ ID NO: 102271 - DNA, 24 bp, Artificial Sequence
  Synthetic
cacatcctgucctagaaagcugat

SEQ ID NO: 102272 - DNA, 23 bp, Artificial Sequence
  Synthetic
cccagctcutatttgtccctugt

SEQ ID NO: 102273 - DNA, 23 bp, Artificial Sequence
  Synthetic
tctgaaaggaguccatccaccua

SEQ ID NO: 102274 - DNA, 21 bp, Artificial Sequence
  Synthetic
gcgattctcutcctgccugaa

SEQ ID NO: 102275 - DNA, 19 bp, Artificial Sequence
  Synthetic
agggcactuggatcccgua

SEQ ID NO: 102276 - DNA, 25 bp, Artificial Sequence
  Synthetic
aagcaaagaacaguctcctugagat

SEQ ID NO: 102277 - DNA, 21 bp, Artificial Sequence
  Synthetic
caaccgguactggucaaggac

SEQ ID NO: 102278 - DNA, 22 bp, Artificial Sequence
  Synthetic
cctggaataguggaggtgctug

SEQ ID NO: 102279 - DNA, 28 bp, Artificial Sequence
  Synthetic
ttaaggccagtuaagagaacatgtuagg

SEQ ID NO: 102280 - DNA, 25 bp, Artificial Sequence
  Synthetic
aggattgttcauaccacaggtgtuc

SEQ ID NO: 102281 - DNA, 21 bp, Artificial Sequence
  Synthetic
gcccttgugcctcaucacaaa

SEQ ID NO: 102282 - DNA, 18 bp, Artificial Sequence
  Synthetic
gccgtgutctggguggag

SEQ ID NO: 102283 - DNA, 27 bp, Artificial Sequence
  Synthetic
cggtagccauaagcacaacattuaaag

SEQ ID NO: 102284 - DNA, 21 bp, Artificial Sequence
  Synthetic
gctgacaguggccttcaucac

SEQ ID NO: 102285 - DNA, 29 bp, Artificial Sequence
  Synthetic
tggaaatgacuagggaatggttcaaaaut

SEQ ID NO: 102286 - DNA, 21 bp, Artificial Sequence
  Synthetic
gggacacacugctgaugacag

SEQ ID NO: 102287 - DNA, 26 bp, Artificial Sequence
  Synthetic
cttaggacctccauctttaccaccua

SEQ ID NO: 102288 - DNA, 21 bp, Artificial Sequence
  Synthetic
tggguaacugagagcagaggt

SEQ ID NO: 102289 - DNA, 27 bp, Artificial Sequence
  Synthetic
cacaaaaguggaagaatcgttgaugaa

SEQ ID NO: 102290 - DNA, 21 bp, Artificial Sequence
  Synthetic
agcttggugaacggaaaggut

SEQ ID NO: 102291 - DNA, 29 bp, Artificial Sequence
  Synthetic
cctattctgatuggtatggctctacucat

SEQ ID NO: 102292 - DNA, 23 bp, Artificial Sequence
  Synthetic
cacaaguctcatttugggcacag

SEQ ID NO: 102293 - DNA, 25 bp, Artificial Sequence
  Synthetic
ctgaaguagcaaaaggaacccugaa

SEQ ID NO: 102294 - DNA, 23 bp, Artificial Sequence
  Synthetic
gtgtacttugagccgtgaaaucc

SEQ ID NO: 102295 - DNA, 28 bp, Artificial Sequence
  Synthetic
acgtgaacagaauttctactgaaugagt

SEQ ID NO: 102296 - DNA, 27 bp, Artificial Sequence
  Synthetic
cttggtagccacautcttgaagtttut

SEQ ID NO: 102297 - DNA, 28 bp, Artificial Sequence
  Synthetic
gcctttactucaccattcaattttcuct

SEQ ID NO: 102298 - DNA, 27 bp, Artificial Sequence
  Synthetic
gggacactaatgauattctctcccaut

SEQ ID NO: 102299 - DNA, 20 bp, Artificial Sequence
  Synthetic
tggctggugaaggtccctua

SEQ ID NO: 102300 - DNA, 22 bp, Artificial Sequence
  Synthetic
tgcaagcagggaauggaatuca

SEQ ID NO: 102301 - DNA, 20 bp, Artificial Sequence
  Synthetic
ccagcgacaccuggatgtuc

SEQ ID NO: 102302 - DNA, 23 bp, Artificial Sequence
  Synthetic
tgaacattucccacagtgucacc

SEQ ID NO: 102303 - DNA, 22 bp, Artificial Sequence
  Synthetic
ggtgttugagagggcttctcut

SEQ ID NO: 102304 - DNA, 27 bp, Artificial Sequence
  Synthetic
ccaaaugatttcaaaugacagcacagt

SEQ ID NO: 102305 - DNA, 27 bp, Artificial Sequence
  Synthetic
ccacatatcutcctcttguaacaggga

SEQ ID NO: 102306 - DNA, 21 bp, Artificial Sequence
  Synthetic
gattccctugcggagcttuac

SEQ ID NO: 102307 - DNA, 24 bp, Artificial Sequence
  Synthetic
gaccuctcatuacacacccaagac

SEQ ID NO: 102308 - DNA, 19 bp, Artificial Sequence
  Synthetic
gcccaggcuctgtacctuc

SEQ ID NO: 102309 - DNA, 19 bp, Artificial Sequence
  Synthetic
tgtccgcauggcctttcut

SEQ ID NO: 102310 - DNA, 27 bp, Artificial Sequence
  Synthetic
ttttggtgtguttgtctcagatugaac

SEQ ID NO: 102311 - DNA, 22 bp, Artificial Sequence
  Synthetic
tcctgaggugtgcgcauaaaaa

SEQ ID NO: 102312 - DNA, 21 bp, Artificial Sequence
  Synthetic
cttcagguggtggagagaugt

SEQ ID NO: 102313 - DNA, 29 bp, Artificial Sequence
  Synthetic
cagagactcacccguttataatagttcut

SEQ ID NO: 102314 - DNA, 21 bp, Artificial Sequence
  Synthetic
gttggcauggcaaccaagaua

SEQ ID NO: 102315 - DNA, 25 bp, Artificial Sequence
  Synthetic
gcagtttgtcucactacagctaugt

SEQ ID NO: 102316 - DNA, 26 bp, Artificial Sequence
  Synthetic
ttcatgaattgccutgtaacctaugg

SEQ ID NO: 102317 - DNA, 26 bp, Artificial Sequence
  Synthetic
attttaacactugggactggttcuct

SEQ ID NO: 102318 - DNA, 26 bp, Artificial Sequence
  Synthetic
cagtatcattgautcgcaacagugac

SEQ ID NO: 102319 - DNA, 28 bp, Artificial Sequence
  Synthetic
gaactttcacaaaauggatcaactcuca

SEQ ID NO: 102320 - DNA, 24 bp, Artificial Sequence
  Synthetic
gtagttucctttacctuggccaga

SEQ ID NO: 102321 - DNA, 25 bp, Artificial Sequence
  Synthetic
ttcacgattccutccagatttgugt

SEQ ID NO: 102322 - DNA, 29 bp, Artificial Sequence
  Synthetic
ccagatctacuaaagcagaauaccaacat

SEQ ID NO: 102323 - DNA, 26 bp, Artificial Sequence
  Synthetic
cttagaaaaugccagcagtgtgatug

SEQ ID NO: 102324 - DNA, 28 bp, Artificial Sequence
  Synthetic
ctcctgatctttuatggtagttctggut

SEQ ID NO: 102325 - DNA, 21 bp, Artificial Sequence
  Synthetic
agggtcagugctgtggactua

SEQ ID NO: 102326 - DNA, 28 bp, Artificial Sequence
  Synthetic
gctgatttcaggutctgatattctcuca

SEQ ID NO: 102327 - DNA, 21 bp, Artificial Sequence
  Synthetic
agtccaatugcaggcaacuct

SEQ ID NO: 102328 - DNA, 22 bp, Artificial Sequence
  Synthetic
ggagaccucagtactgcuccat

SEQ ID NO: 102329 - DNA, 26 bp, Artificial Sequence
  Synthetic
agagggtgatucagactcagtuagag

SEQ ID NO: 102330 - DNA, 28 bp, Artificial Sequence
  Synthetic
agaauaacatcacagucaagaaaccaca

SEQ ID NO: 102331 - DNA, 25 bp, Artificial Sequence
  Synthetic
aggagtugcgacagatgaucaaaat

SEQ ID NO: 102332 - DNA, 26 bp, Artificial Sequence
  Synthetic
gaaaaacaacaaccagguctguaaca

SEQ ID NO: 102333 - DNA, 26 bp, Artificial Sequence
  Synthetic
tgctagacucagtagtgaaucaacga

SEQ ID NO: 102334 - DNA, 22 bp, Artificial Sequence
  Synthetic
cagcccacacutcttuaagggt

SEQ ID NO: 102335 - DNA, 28 bp, Artificial Sequence
  Synthetic
gcctactgatgaguattctttcttccut

SEQ ID NO: 102336 - DNA, 29 bp, Artificial Sequence
  Synthetic
atttgaaaagaagucctagtggagtcauc

SEQ ID NO: 102337 - DNA, 21 bp, Artificial Sequence
  Synthetic
agggcctgcucaaaagtctuc

SEQ ID NO: 102338 - DNA, 22 bp, Artificial Sequence
  Synthetic
atctuggaggttcugcaaacga

SEQ ID NO: 102339 - DNA, 27 bp, Artificial Sequence
  Synthetic
tggaagcaaugactgagaaatuacagt

SEQ ID NO: 102340 - DNA, 28 bp, Artificial Sequence
  Synthetic
gctgaagtctutctttcatctgaugaca

SEQ ID NO: 102341 - DNA, 28 bp, Artificial Sequence
  Synthetic
ccaagctttuccagagaatggtgauaat

SEQ ID NO: 102342 - DNA, 24 bp, Artificial Sequence
  Synthetic
aaggauaaccugcccaaaagacaa

SEQ ID NO: 102343 - DNA, 28 bp, Artificial Sequence
  Synthetic
actgaaaaatgcccutttatcacctcua

SEQ ID NO: 102344 - DNA, 22 bp, Artificial Sequence
  Synthetic
aggccaaagacggguttcatua

SEQ ID NO: 102345 - DNA, 24 bp, Artificial Sequence
  Synthetic
gagtcagccaugattttctuccct

SEQ ID NO: 102346 - DNA, 20 bp, Artificial Sequence
  Synthetic
caucgcuacaaagcccagga

SEQ ID NO: 102347 - DNA, 21 bp, Artificial Sequence
  Synthetic
cgacugccaccatcgtauagt

SEQ ID NO: 102348 - DNA, 23 bp, Artificial Sequence
  Synthetic
tgtacaguacacgctagugaggt

SEQ ID NO: 102349 - DNA, 24 bp, Artificial Sequence
  Synthetic
cctgcccgucaatgtcatgaauat

SEQ ID NO: 102350 - DNA, 20 bp, Artificial Sequence
  Synthetic
ctttgucgccagcttgaucc

SEQ ID NO: 102351 - DNA, 26 bp, Artificial Sequence
  Synthetic
gaaaatcaaucagccaaactcagcut

SEQ ID NO: 102352 - DNA, 22 bp, Artificial Sequence
  Synthetic
cctgtgggcugttcttggtuaa

SEQ ID NO: 102353 - DNA, 21 bp, Artificial Sequence
  Synthetic
gctggctguccatgttctcug

SEQ ID NO: 102354 - DNA, 22 bp, Artificial Sequence
  Synthetic
cctgcagaguggtgatgtauga

SEQ ID NO: 102355 - DNA, 25 bp, Artificial Sequence
  Synthetic
tgtacattcauggtgatgttgcuct

SEQ ID NO: 102356 - DNA, 21 bp, Artificial Sequence
  Synthetic
ggacacgtccuctcctctcuc

SEQ ID NO: 102357 - DNA, 21 bp, Artificial Sequence
  Synthetic
agggtgtucaccttgcttucc

SEQ ID NO: 102358 - DNA, 18 bp, Artificial Sequence
  Synthetic
cacaaccucgcccagtuc

SEQ ID NO: 102359 - DNA, 18 bp, Artificial Sequence
  Synthetic
cggagcgcccutcacaut

SEQ ID NO: 102360 - DNA, 17 bp, Artificial Sequence
  Synthetic
gacccgccagcccuaut

SEQ ID NO: 102361 - DNA, 17 bp, Artificial Sequence
  Synthetic
gcggcugtgggtttugg

SEQ ID NO: 102362 - DNA, 28 bp, Artificial Sequence
  Synthetic
attcagtuacacgaacactaaucaaaga

SEQ ID NO: 102363 - DNA, 23 bp, Artificial Sequence
  Synthetic
aaccuaaucaaggaagcgggaaa

SEQ ID NO: 102364 - DNA, 27 bp, Artificial Sequence
  Synthetic
aagtagcutgagaaagtuggaaggaaa

SEQ ID NO: 102365 - DNA, 28 bp, Artificial Sequence
  Synthetic
tcagtttgctaaugggttgctcttauat

SEQ ID NO: 102366 - DNA, 25 bp, Artificial Sequence
  Synthetic
aggtccattttuctctggtttguca

SEQ ID NO: 102367 - DNA, 22 bp, Artificial Sequence
  Synthetic
ccaucacagctacaugaacgct

SEQ ID NO: 102368 - DNA, 20 bp, Artificial Sequence
  Synthetic
aacctatcccguccaccuga

SEQ ID NO: 102369 - DNA, 18 bp, Artificial Sequence
  Synthetic
ctacggcggauggacugt

SEQ ID NO: 102370 - DNA, 24 bp, Artificial Sequence
  Synthetic
tggttcatguaggcagggttacua

SEQ ID NO: 102371 - DNA, 20 bp, Artificial Sequence
  Synthetic
gttcagcguggcaugaacat

SEQ ID NO: 102372 - DNA, 24 bp, Artificial Sequence
  Synthetic
tgacccaccauattctggtacuga

SEQ ID NO: 102373 - DNA, 27 bp, Artificial Sequence
  Synthetic
ctcacttagtuttcttttgcttuggca

SEQ ID NO: 102374 - DNA, 20 bp, Artificial Sequence
  Synthetic
cagaaugagctctgcuccct

SEQ ID NO: 102375 - DNA, 18 bp, Artificial Sequence
  Synthetic
agccgagggugtggagua

SEQ ID NO: 102376 - DNA, 21 bp, Artificial Sequence
  Synthetic
gtgtcagcgcucagattucac

SEQ ID NO: 102377 - DNA, 20 bp, Artificial Sequence
  Synthetic
gaacccggutcuagaagcca

SEQ ID NO: 102378 - DNA, 22 bp, Artificial Sequence
  Synthetic
ggaatgaugcggagggtaacug

SEQ ID NO: 102379 - DNA, 22 bp, Artificial Sequence
  Synthetic
ctgtggcaagcugaaaguagga

SEQ ID NO: 102380 - DNA, 22 bp, Artificial Sequence
  Synthetic
cacaatccucttgggtcugaca

SEQ ID NO: 102381 - DNA, 21 bp, Artificial Sequence
  Synthetic
tgagtugggcaaguggaaaga

SEQ ID NO: 102382 - DNA, 23 bp, Artificial Sequence
  Synthetic
ctcatgtaagguccgttgaguga

SEQ ID NO: 102383 - DNA, 21 bp, Artificial Sequence
  Synthetic
gcctauacccagcagcctaug

SEQ ID NO: 102384 - DNA, 19 bp, Artificial Sequence
  Synthetic
gcttgucgcagcagaaguc

SEQ ID NO: 102385 - DNA, 22 bp, Artificial Sequence
  Synthetic
cactggaauaggcgtugaggat

SEQ ID NO: 102386 - DNA, 23 bp, Artificial Sequence
  Synthetic
cgggaguaggcatcagatuaacc

SEQ ID NO: 102387 - DNA, 22 bp, Artificial Sequence
  Synthetic
catttccauccgctccaaguct

SEQ ID NO: 102388 - DNA, 22 bp, Artificial Sequence
  Synthetic
ggcctgtguacatcatgtuccc

SEQ ID NO: 102389 - DNA, 21 bp, Artificial Sequence
  Synthetic
agcccatgaugaacagcagut

SEQ ID NO: 102390 - DNA, 21 bp, Artificial Sequence
  Synthetic
cagguccatugagggcaacat

SEQ ID NO: 102391 - DNA, 20 bp, Artificial Sequence
  Synthetic
cuaagcagucgaccccgaag

SEQ ID NO: 102392 - DNA, 23 bp, Artificial Sequence
  Synthetic
gtgtuccagaaccagttgtugag

SEQ ID NO: 102393 - DNA, 21 bp, Artificial Sequence
  Synthetic
cuccagcagaccauaagggat

SEQ ID NO: 102394 - DNA, 33 bp, Artificial Sequence
  Synthetic
aatttaagtacattttuctcattggcatatuct

SEQ ID NO: 102395 - DNA, 25 bp, Artificial Sequence
  Synthetic
acctcacagccagauacttggauaa

SEQ ID NO: 102396 - DNA, 28 bp, Artificial Sequence
  Synthetic
gtctttagcccaaagauactagcatugt

SEQ ID NO: 102397 - DNA, 27 bp, Artificial Sequence
  Synthetic
cgacttggauaaattttgctgaugagt

SEQ ID NO: 102398 - DNA, 20 bp, Artificial Sequence
  Synthetic
gatgggcuacggccauacag

SEQ ID NO: 102399 - DNA, 23 bp, Artificial Sequence
  Synthetic
ctcacatctccuctgcttcagug

SEQ ID NO: 102400 - DNA, 22 bp, Artificial Sequence
  Synthetic
tcttcatccugtggacccauca

SEQ ID NO: 102401 - DNA, 25 bp, Artificial Sequence
  Synthetic
ccacttttcttcutccctcttccuc

SEQ ID NO: 102402 - DNA, 21 bp, Artificial Sequence
  Synthetic
ggtaacgccacugttgaucac

SEQ ID NO: 102403 - DNA, 24 bp, Artificial Sequence
  Synthetic
ggccactggcugttgctatauaaa

SEQ ID NO: 102404 - DNA, 21 bp, Artificial Sequence
  Synthetic
gctcaagcugcttcttccgut

SEQ ID NO: 102405 - DNA, 22 bp, Artificial Sequence
  Synthetic
cattttgcuggtgggaugaact

SEQ ID NO: 102406 - DNA, 25 bp, Artificial Sequence
  Synthetic
gaacatccattuactgccaagaucc

SEQ ID NO: 102407 - DNA, 26 bp, Artificial Sequence
  Synthetic
ttccctttgcuatattcccacguaac

SEQ ID NO: 102408 - DNA, 28 bp, Artificial Sequence
  Synthetic
gtaaaacacauttagtgaagugaagcca

SEQ ID NO: 102409 - DNA, 22 bp, Artificial Sequence
  Synthetic
cctccccuccttgttgcattut

SEQ ID NO: 102410 - DNA, 22 bp, Artificial Sequence
  Synthetic
caaaggcaccautcccaucaag

SEQ ID NO: 102411 - DNA, 22 bp, Artificial Sequence
  Synthetic
cactgcaugtcttgcatucgat

SEQ ID NO: 102412 - DNA, 26 bp, Artificial Sequence
  Synthetic
gaaacacccauatuagaaggcagaga

SEQ ID NO: 102413 - DNA, 23 bp, Artificial Sequence
  Synthetic
tgttcuccctcgtatuaggccat

SEQ ID NO: 102414 - DNA, 28 bp, Artificial Sequence
  Synthetic
cctaacataaatggucagcagaagctua

SEQ ID NO: 102415 - DNA, 27 bp, Artificial Sequence
  Synthetic
tggatagactgauactgctttgttucc

SEQ ID NO: 102416 - DNA, 29 bp, Artificial Sequence
  Synthetic
cattttgcatatcautgtaggacttggut

SEQ ID NO: 102417 - DNA, 24 bp, Artificial Sequence
  Synthetic
catgcaaatgugtctctccaucac

SEQ ID NO: 102418 - DNA, 21 bp, Artificial Sequence
  Synthetic
ggccagacccaaacuttgaug

SEQ ID NO: 102419 - DNA, 24 bp, Artificial Sequence
  Synthetic
ctgttcauggcctgtatctucagt

SEQ ID NO: 102420 - DNA, 28 bp, Artificial Sequence
  Synthetic
ccatcctgttugaaattttgtccugaat

SEQ ID NO: 102421 - DNA, 25 bp, Artificial Sequence
  Synthetic
acacctuaacactggaaatuagcga

SEQ ID NO: 102422 - DNA, 22 bp, Artificial Sequence
  Synthetic
caatgttgguggcagacatgut

SEQ ID NO: 102423 - DNA, 22 bp, Artificial Sequence
  Synthetic
tgcaaccagugtttctctgucc

SEQ ID NO: 102424 - DNA, 20 bp, Artificial Sequence
  Synthetic
acagcauggcggtaaaggut

SEQ ID NO: 102425 - DNA, 29 bp, Artificial Sequence
  Synthetic
ccctgtgttgaugtggtatgtctatttua

SEQ ID NO: 102426 - DNA, 22 bp, Artificial Sequence
  Synthetic
gccagugagaagcagtauacca

SEQ ID NO: 102427 - DNA, 22 bp, Artificial Sequence
  Synthetic
ccaccactugccactcagtuag

SEQ ID NO: 102428 - DNA, 25 bp, Artificial Sequence
  Synthetic
ccaggaucaacaagcacaataauca

SEQ ID NO: 102429 - DNA, 27 bp, Artificial Sequence
  Synthetic
gtattcagaaaaacagcuaccctcuct

SEQ ID NO: 102430 - DNA, 29 bp, Artificial Sequence
  Synthetic
ctcatgagctcutatgtgttatgttugga

SEQ ID NO: 102431 - DNA, 23 bp, Artificial Sequence
  Synthetic
gcctctctucatctgagttguca

SEQ ID NO: 102432 - DNA, 21 bp, Artificial Sequence
  Synthetic
ccaaucacaacccucacccat

SEQ ID NO: 102433 - DNA, 20 bp, Artificial Sequence
  Synthetic
ctcggaaacgucaggtugga

SEQ ID NO: 102434 - DNA, 18 bp, Artificial Sequence
  Synthetic
gccutcccuccacccact

SEQ ID NO: 102435 - DNA, 24 bp, Artificial Sequence
  Synthetic
gctgaaaccacccuttctgatcut

SEQ ID NO: 102436 - DNA, 21 bp, Artificial Sequence
  Synthetic
cagctgagccagucctgtaut

SEQ ID NO: 102437 - DNA, 22 bp, Artificial Sequence
  Synthetic
ggcagctacuctcaaccaucag

SEQ ID NO: 102438 - DNA, 21 bp, Artificial Sequence
  Synthetic
ccttccugacctcaccacuct

SEQ ID NO: 102439 - DNA, 22 bp, Artificial Sequence
  Synthetic
cacccaaccacugacccataut

SEQ ID NO: 102440 - DNA, 24 bp, Artificial Sequence
  Synthetic
gacagaagtacugaatgagcccut

SEQ ID NO: 102441 - DNA, 23 bp, Artificial Sequence
  Synthetic
tgtcttttctucccaggctgaug

SEQ ID NO: 102442 - DNA, 25 bp, Artificial Sequence
  Synthetic
acctaggtauctcatgttgugaagt

SEQ ID NO: 102443 - DNA, 21 bp, Artificial Sequence
  Synthetic
gctaacccaucatggcccauc

SEQ ID NO: 102444 - DNA, 26 bp, Artificial Sequence
  Synthetic
aatgtgctttcacuaacatcctccut

SEQ ID NO: 102445 - DNA, 24 bp, Artificial Sequence
  Synthetic
gattcatgugaccgaggtttucac

SEQ ID NO: 102446 - DNA, 20 bp, Artificial Sequence
  Synthetic
ggcggaucacaacacuccat

SEQ ID NO: 102447 - DNA, 27 bp, Artificial Sequence
  Synthetic
tcatgatcguaacatgtttctgctuca

SEQ ID NO: 102448 - DNA, 28 bp, Artificial Sequence
  Synthetic
ttattgtggttugtgcagttttcauaat

SEQ ID NO: 102449 - DNA, 22 bp, Artificial Sequence
  Synthetic
aggctcattugtgctccttugt

SEQ ID NO: 102450 - DNA, 24 bp, Artificial Sequence
  Synthetic
cccauggaactttatuacgcacct

SEQ ID NO: 102451 - DNA, 27 bp, Artificial Sequence
  Synthetic
tctggcucagaaagaaaatugaacaac

SEQ ID NO: 102452 - DNA, 18 bp, Artificial Sequence
  Synthetic
tgtcauagccccgtgcug

SEQ ID NO: 102453 - DNA, 25 bp, Artificial Sequence
  Synthetic
caacttaccacuactgccacaauct

SEQ ID NO: 102454 - DNA, 24 bp, Artificial Sequence
  Synthetic
cctatccttttcucccctcaccut

SEQ ID NO: 102455 - DNA, 28 bp, Artificial Sequence
  Synthetic
tggatatgtcaaauatgtcgaccuagga

SEQ ID NO: 102456 - DNA, 24 bp, Artificial Sequence
  Synthetic
ccagtccugagaaaagcatuccag

SEQ ID NO: 102457 - DNA, 26 bp, Artificial Sequence
  Synthetic
acccagtcagauacagacattcucaa

SEQ ID NO: 102458 - DNA, 27 bp, Artificial Sequence
  Synthetic
tttatctgtgcugccttcttttguaga

SEQ ID NO: 102459 - DNA, 29 bp, Artificial Sequence
  Synthetic
aacctttcagugtatttatgtctgucaca

SEQ ID NO: 102460 - DNA, 28 bp, Artificial Sequence
  Synthetic
atcccattccaauatgtagcttctgtut

SEQ ID NO: 102461 - DNA, 27 bp, Artificial Sequence
  Synthetic
agcatgaagctaugataatgggaaguc

SEQ ID NO: 102462 - DNA, 24 bp, Artificial Sequence
  Synthetic
acttgggagutacgagatuccact

SEQ ID NO: 102463 - DNA, 22 bp, Artificial Sequence
  Synthetic
cccttgtgccucctgttatucc

SEQ ID NO: 102464 - DNA, 22 bp, Artificial Sequence
  Synthetic
gacaucacggctacaugaacac

SEQ ID NO: 102465 - DNA, 27 bp, Artificial Sequence
  Synthetic
tcaaaggtattugtgcagatcaaucca

SEQ ID NO: 102466 - DNA, 21 bp, Artificial Sequence
  Synthetic
ggattgctuggagggtggtut

SEQ ID NO: 102467 - DNA, 29 bp, Artificial Sequence
  Synthetic
gcccttggtttautgccttgagtattaut

SEQ ID NO: 102468 - DNA, 22 bp, Artificial Sequence
  Synthetic
acacagagaagguccacuggaa

SEQ ID NO: 102469 - DNA, 24 bp, Artificial Sequence
  Synthetic
cttgacutgtgttttcuccaccag

SEQ ID NO: 102470 - DNA, 26 bp, Artificial Sequence
  Synthetic
ggctctgacauacttgatctgttuct

SEQ ID NO: 102471 - DNA, 28 bp, Artificial Sequence
  Synthetic
atcagcttccuggatcatgaaaguaaat

SEQ ID NO: 102472 - DNA, 25 bp, Artificial Sequence
  Synthetic
tggaggagugcaaacuaaagaaaca

SEQ ID NO: 102473 - DNA, 26 bp, Artificial Sequence
  Synthetic
tcattccugctattccttuggagaag

SEQ ID NO: 102474 - DNA, 17 bp, Artificial Sequence
  Synthetic
ccctcccuccgcttcuc

SEQ ID NO: 102475 - DNA, 26 bp, Artificial Sequence
  Synthetic
agtauagcagacaacccaaugaacac

SEQ ID NO: 102476 - DNA, 23 bp, Artificial Sequence
  Synthetic
gttcagcauacaggcatcctuga

SEQ ID NO: 102477 - DNA, 28 bp, Artificial Sequence
  Synthetic
gctttctcaugaagtagttttctuccct

SEQ ID NO: 102478 - DNA, 21 bp, Artificial Sequence
  Synthetic
caucttgttgtguccccgagt

SEQ ID NO: 102479 - DNA, 28 bp, Artificial Sequence
  Synthetic
tctattacgatguggagccatttcttut

SEQ ID NO: 102480 - DNA, 21 bp, Artificial Sequence
  Synthetic
cgaagtcccautccaggtgug

SEQ ID NO: 102481 - DNA, 20 bp, Artificial Sequence
  Synthetic
tccagtuacccacccgauct

SEQ ID NO: 102482 - DNA, 22 bp, Artificial Sequence
  Synthetic
ggatgtggauttgccaagtcug

SEQ ID NO: 102483 - DNA, 24 bp, Artificial Sequence
  Synthetic
tctcaaccuacaacaatcgtugct

SEQ ID NO: 102484 - DNA, 25 bp, Artificial Sequence
  Synthetic
acccatuggacgaccgaaaaauaaa

SEQ ID NO: 102485 - DNA, 28 bp, Artificial Sequence
  Synthetic
acccctaaaggaauctgagagaauaaca

SEQ ID NO: 102486 - DNA, 29 bp, Artificial Sequence
  Synthetic
cccttgacatcautctgtgttagtacaua

SEQ ID NO: 102487 - DNA, 25 bp, Artificial Sequence
  Synthetic
gagaccctcuactgactgttttgut

SEQ ID NO: 102488 - DNA, 26 bp, Artificial Sequence
  Synthetic
acaagaugaaugaaaacggagagaca

SEQ ID NO: 102489 - DNA, 28 bp, Artificial Sequence
  Synthetic
atgtacattaagcuttgcaaaattguga

SEQ ID NO: 102490 - DNA, 23 bp, Artificial Sequence
  Synthetic
ccccatguggtgatgatttguga

SEQ ID NO: 102491 - DNA, 23 bp, Artificial Sequence
  Synthetic
tgctctcguttattttccuggca

SEQ ID NO: 102492 - DNA, 20 bp, Artificial Sequence
  Synthetic
cacctcaggcuccttggtut

SEQ ID NO: 102493 - DNA, 17 bp, Artificial Sequence
  Synthetic
augccccuacccgagga

SEQ ID NO: 102494 - DNA, 27 bp, Artificial Sequence
  Synthetic
gatgtcaggcugtacttaacacaaaug

SEQ ID NO: 102495 - DNA, 26 bp, Artificial Sequence
  Synthetic
tgctcttctugccctaaatgttctut

SEQ ID NO: 102496 - DNA, 20 bp, Artificial Sequence
  Synthetic
actcctgacuctgcccacua

SEQ ID NO: 102497 - DNA, 21 bp, Artificial Sequence
  Synthetic
cctttcaggcuactgctgcut

SEQ ID NO: 102498 - DNA, 27 bp, Artificial Sequence
  Synthetic
gacttctccautttcagtauaggccat

SEQ ID NO: 102499 - DNA, 28 bp, Artificial Sequence
  Synthetic
attaccacctgugaatagtagcatcauc

SEQ ID NO: 102500 - DNA, 27 bp, Artificial Sequence
  Synthetic
agtgactctttuacaggaggcaauaac

SEQ ID NO: 102501 - DNA, 22 bp, Artificial Sequence
  Synthetic
gtgatgaugcagtcugcacaaa

SEQ ID NO: 102502 - DNA, 19 bp, Artificial Sequence
  Synthetic
acttcacugctggcugcat

SEQ ID NO: 102503 - DNA, 24 bp, Artificial Sequence
  Synthetic
tcgtttccautcctaaagcuggac

SEQ ID NO: 102504 - DNA, 21 bp, Artificial Sequence
  Synthetic
cauctgctgagugaccacaca

SEQ ID NO: 102505 - DNA, 25 bp, Artificial Sequence
  Synthetic
gcaccacugaaaactaugagaaccc

SEQ ID NO: 102506 - DNA, 17 bp, Artificial Sequence
  Synthetic
ggcauccccagcacuga

SEQ ID NO: 102507 - DNA, 22 bp, Artificial Sequence
  Synthetic
tgcctgttucctacttcuccca

SEQ ID NO: 102508 - DNA, 26 bp, Artificial Sequence
  Synthetic
gaacaaaacaacccuacttaccucct

SEQ ID NO: 102509 - DNA, 19 bp, Artificial Sequence
  Synthetic
gugccgaggccugaaagaa

SEQ ID NO: 102510 - DNA, 20 bp, Artificial Sequence
  Synthetic
cccatcguggagtcguaact

SEQ ID NO: 102511 - DNA, 21 bp, Artificial Sequence
  Synthetic
ccccatgauggatgtgcctuc

SEQ ID NO: 102512 - DNA, 28 bp, Artificial Sequence
  Synthetic
atgactacaaaggagugtttacatcgut

SEQ ID NO: 102513 - DNA, 22 bp, Artificial Sequence
  Synthetic
cctggaaagcacuttcgtggua

SEQ ID NO: 102514 - DNA, 22 bp, Artificial Sequence
  Synthetic
cttctgagaaggguccgtgaug

SEQ ID NO: 102515 - DNA, 25 bp, Artificial Sequence
  Synthetic
tctctctcucacctcttcacaugat

SEQ ID NO: 102516 - DNA, 29 bp, Artificial Sequence
  Synthetic
ctgaagacaauaaaccacagtaagugagt

SEQ ID NO: 102517 - DNA, 21 bp, Artificial Sequence
  Synthetic
tcgtttgtcutcgcaggaugt

SEQ ID NO: 102518 - DNA, 24 bp, Artificial Sequence
  Synthetic
ggtcatctggaucaaaaggcaaug

SEQ ID NO: 102519 - DNA, 22 bp, Artificial Sequence
  Synthetic
cccacacucttgccttcuacag

SEQ ID NO: 102520 - DNA, 24 bp, Artificial Sequence
  Synthetic
caaaacagaaggucaagggtcuct

SEQ ID NO: 102521 - DNA, 19 bp, Artificial Sequence
  Synthetic
atccacaaguccgctgucc

SEQ ID NO: 102522 - DNA, 26 bp, Artificial Sequence
  Synthetic
gaggagtaccaggugtgaatttcaua

SEQ ID NO: 102523 - DNA, 30 bp, Artificial Sequence
  Synthetic
tctttgttatcucagtgtgtctaattuagc

SEQ ID NO: 102524 - DNA, 21 bp, Artificial Sequence
  Synthetic
acctgcugagagtggtcugat

SEQ ID NO: 102525 - DNA, 20 bp, Artificial Sequence
  Synthetic
ctgccctugagagtggcuac

SEQ ID NO: 102526 - DNA, 23 bp, Artificial Sequence
  Synthetic
ggtggcccuacttatgaaaugga

SEQ ID NO: 102527 - DNA, 24 bp, Artificial Sequence
  Synthetic
gcacatgaagaaaugtggttggut

SEQ ID NO: 102528 - DNA, 24 bp, Artificial Sequence
  Synthetic
ttagaagaggacugacaccugagt

SEQ ID NO: 102529 - DNA, 23 bp, Artificial Sequence
  Synthetic
gccaagatuagaacccacgttug

SEQ ID NO: 102530 - DNA, 22 bp, Artificial Sequence
  Synthetic
gautggagtcucaccacacaga

SEQ ID NO: 102531 - DNA, 20 bp, Artificial Sequence
  Synthetic
ctttggctucacggtggtug

SEQ ID NO: 102532 - DNA, 30 bp, Artificial Sequence
  Synthetic
ggtatacaaaaagaugtgatactcacuggt

SEQ ID NO: 102533 - DNA, 27 bp, Artificial Sequence
  Synthetic
tgacaagcagaucagcattaagaagut

SEQ ID NO: 102534 - DNA, 25 bp, Artificial Sequence
  Synthetic
cugtaaatctcatuggcaggaggat

SEQ ID NO: 102535 - DNA, 20 bp, Artificial Sequence
  Synthetic
atcgttuacaggcugcccaa

SEQ ID NO: 102536 - DNA, 24 bp, Artificial Sequence
  Synthetic
cactctccuggatcttgggttuac

SEQ ID NO: 102537 - DNA, 23 bp, Artificial Sequence
  Synthetic
ctggaagaaaagaccuggucgaa

SEQ ID NO: 102538 - DNA, 27 bp, Artificial Sequence
  Synthetic
cctgcacgtucttcttattaactucca

SEQ ID NO: 102539 - DNA, 22 bp, Artificial Sequence
  Synthetic
ggccaaugggctttggtttuac

SEQ ID NO: 102540 - DNA, 27 bp, Artificial Sequence
  Synthetic
ggctacgacuctttaaaattugcacat

SEQ ID NO: 102541 - DNA, 20 bp, Artificial Sequence
  Synthetic
cucggtgccuaaacaagcag

SEQ ID NO: 102542 - DNA, 23 bp, Artificial Sequence
  Synthetic
tgctagcataugtccgtatguga

SEQ ID NO: 102543 - DNA, 23 bp, Artificial Sequence
  Synthetic
caagttcautggctcuggaacag

SEQ ID NO: 102544 - DNA, 20 bp, Artificial Sequence
  Synthetic
ggctcuttccactugcccaa

SEQ ID NO: 102545 - DNA, 22 bp, Artificial Sequence
  Synthetic
ctgccagguaacagaagacugt

SEQ ID NO: 102546 - DNA, 25 bp, Artificial Sequence
  Synthetic
tcttcctccucttcttcatcgauct

SEQ ID NO: 102547 - DNA, 28 bp, Artificial Sequence
  Synthetic
cacaatagcagtguagtcacagaaacua

SEQ ID NO: 102548 - DNA, 26 bp, Artificial Sequence
  Synthetic
gttcatctaacacutcagtggtcuca

SEQ ID NO: 102549 - DNA, 33 bp, Artificial Sequence
  Synthetic
gaaaagatagtgtucataactgtaaatactugc

SEQ ID NO: 102550 - DNA, 24 bp, Artificial Sequence
  Synthetic
ccggctauactttcaaaacucagg

SEQ ID NO: 102551 - DNA, 28 bp, Artificial Sequence
  Synthetic
accacattgaccuatggtgttaattcut

SEQ ID NO: 102552 - DNA, 21 bp, Artificial Sequence
  Synthetic
cacactctuccagtggctuct

SEQ ID NO: 102553 - DNA, 22 bp, Artificial Sequence
  Synthetic
agtgtgtaautccgtcatuggg

SEQ ID NO: 102554 - DNA, 22 bp, Artificial Sequence
  Synthetic
gatccttgtuctgggctgauct

SEQ ID NO: 102555 - DNA, 21 bp, Artificial Sequence
  Synthetic
cgaggacccucagatguccat

SEQ ID NO: 102556 - DNA, 21 bp, Artificial Sequence
  Synthetic
ccgutcacactugcagaacag

SEQ ID NO: 102557 - DNA, 20 bp, Artificial Sequence
  Synthetic
ccgtgatcucgtcccuacca

SEQ ID NO: 102558 - DNA, 22 bp, Artificial Sequence
  Synthetic
gcagattccagucaacttgcut

SEQ ID NO: 102559 - DNA, 26 bp, Artificial Sequence
  Synthetic
tctccagagaaaccgutatctgauct

SEQ ID NO: 102560 - DNA, 23 bp, Artificial Sequence
  Synthetic
agccacauggaaaagcugaaaac

SEQ ID NO: 102561 - DNA, 28 bp, Artificial Sequence
  Synthetic
agacaatcattaccuctttctcagctuc

SEQ ID NO: 102562 - DNA, 20 bp, Artificial Sequence
  Synthetic
ccuggcaaccaatcuagggt

SEQ ID NO: 102563 - DNA, 23 bp, Artificial Sequence
  Synthetic
catacagaccugctccctttucc

SEQ ID NO: 102564 - DNA, 20 bp, Artificial Sequence
  Synthetic
caccaggacugtctgcgaua

SEQ ID NO: 102565 - DNA, 28 bp, Artificial Sequence
  Synthetic
gttctcatggtuatcctaatgacacugt

SEQ ID NO: 102566 - DNA, 25 bp, Artificial Sequence
  Synthetic
gatctggagaaacucatcaggtuca

SEQ ID NO: 102567 - DNA, 22 bp, Artificial Sequence
  Synthetic
agtggugacattccttaugcgt

SEQ ID NO: 102568 - DNA, 24 bp, Artificial Sequence
  Synthetic
cccgactcaacutaaatcctggut

SEQ ID NO: 102569 - DNA, 26 bp, Artificial Sequence
  Synthetic
gaaaacgtgaugtgaagaattcucct

SEQ ID NO: 102570 - DNA, 20 bp, Artificial Sequence
  Synthetic
ggacctgcuccagctccuat

SEQ ID NO: 102571 - DNA, 20 bp, Artificial Sequence
  Synthetic
ccacaccugcctttcccauc

SEQ ID NO: 102572 - DNA, 25 bp, Artificial Sequence
  Synthetic
caauatgccatguaggaaagacgac

SEQ ID NO: 102573 - DNA, 26 bp, Artificial Sequence
  Synthetic
gagttgctgaccuagttctgattuga

SEQ ID NO: 102574 - DNA, 23 bp, Artificial Sequence
  Synthetic
ggtgtggaugtatctggcucaag

SEQ ID NO: 102575 - DNA, 26 bp, Artificial Sequence
  Synthetic
tgctagtctuggaagaaggaacuaga

SEQ ID NO: 102576 - DNA, 25 bp, Artificial Sequence
  Synthetic
gcttgcctucgtaacacatttuaga

SEQ ID NO: 102577 - DNA, 22 bp, Artificial Sequence
  Synthetic
gtgtttttctucacagccggut

SEQ ID NO: 102578 - DNA, 23 bp, Artificial Sequence
  Synthetic
gctcattccagcauctgcttcut

SEQ ID NO: 102579 - DNA, 21 bp, Artificial Sequence
  Synthetic
ccaccccauttgcctcuacag

SEQ ID NO: 102580 - DNA, 29 bp, Artificial Sequence
  Synthetic
atactcttucagaactgtaagcuaaaacg

SEQ ID NO: 102581 - DNA, 22 bp, Artificial Sequence
  Synthetic
ctcgccaccaautcucacaaag

SEQ ID NO: 102582 - DNA, 21 bp, Artificial Sequence
  Synthetic
tccgagauggctggctattug

SEQ ID NO: 102583 - DNA, 22 bp, Artificial Sequence
  Synthetic
ggtgggaaaguctgtgtcucat

SEQ ID NO: 102584 - DNA, 21 bp, Artificial Sequence
  Synthetic
gacgcaugacagtctucaacc

SEQ ID NO: 102585 - DNA, 22 bp, Artificial Sequence
  Synthetic
gtacaggcagugcagtcttuga

SEQ ID NO: 102586 - DNA, 28 bp, Artificial Sequence
  Synthetic
gccataacttcuggtttcttttcactut

SEQ ID NO: 102587 - DNA, 31 bp, Artificial Sequence
  Synthetic
ttctctcaatacutaaaaggtcagaauaggt

SEQ ID NO: 102588 - DNA, 32 bp, Artificial Sequence
  Synthetic
accatatagaagaaacaautttatatggugca

SEQ ID NO: 102589 - DNA, 22 bp, Artificial Sequence
  Synthetic
ccaggaagagcutggcuaacaa

SEQ ID NO: 102590 - DNA, 23 bp, Artificial Sequence
  Synthetic
gaaatgcgtuacctttcgctuca

SEQ ID NO: 102591 - DNA, 26 bp, Artificial Sequence
  Synthetic
agatuaacagaaggaagugagaggct

SEQ ID NO: 102592 - DNA, 31 bp, Artificial Sequence
  Synthetic
ctgatactattcuctaaatttctgccuaggt

SEQ ID NO: 102593 - DNA, 23 bp, Artificial Sequence
  Synthetic
cagatgaaggugtgguacagact

SEQ ID NO: 102594 - DNA, 29 bp, Artificial Sequence
  Synthetic
gctaggttgaugggaatatgagcaaaaut

SEQ ID NO: 102595 - DNA, 22 bp, Artificial Sequence
  Synthetic
caaccagaugacagccctttuc

SEQ ID NO: 102596 - DNA, 23 bp, Artificial Sequence
  Synthetic
tgaggtcugagtcagcttucact

SEQ ID NO: 102597 - DNA, 20 bp, Artificial Sequence
  Synthetic
ggcttcgucatcgtgtccuc

SEQ ID NO: 102598 - DNA, 26 bp, Artificial Sequence
  Synthetic
acagattaccaaagcuttacctgugt

SEQ ID NO: 102599 - DNA, 27 bp, Artificial Sequence
  Synthetic
cgcttacctcaaauactgaaaggtcut

SEQ ID NO: 102600 - DNA, 24 bp, Artificial Sequence
  Synthetic
ctcaagagaaccaucatggcucat

SEQ ID NO: 102601 - DNA, 20 bp, Artificial Sequence
  Synthetic
gauacccaggacgaguggac

SEQ ID NO: 102602 - DNA, 22 bp, Artificial Sequence
  Synthetic
ggcuauggaggaagccaaagaa

SEQ ID NO: 102603 - DNA, 23 bp, Artificial Sequence
  Synthetic
tcaccagcuagccacagtaguaa

SEQ ID NO: 102604 - DNA, 27 bp, Artificial Sequence
  Synthetic
gtaaccagtgaugaaggatccaugaat

SEQ ID NO: 102605 - DNA, 21 bp, Artificial Sequence
  Synthetic
gggtctguaacagccaatcug

SEQ ID NO: 102606 - DNA, 28 bp, Artificial Sequence
  Synthetic
tgtattatgatgucgagccattccttut

SEQ ID NO: 102607 - DNA, 23 bp, Artificial Sequence
  Synthetic
ccctgtucaaagaattgggcuct

SEQ ID NO: 102608 - DNA, 26 bp, Artificial Sequence
  Synthetic
tccagcaaaugaaattuaccgaagga

SEQ ID NO: 102609 - DNA, 28 bp, Artificial Sequence
  Synthetic
accttctaaacacaaaucagcacauagt

SEQ ID NO: 102610 - DNA, 20 bp, Artificial Sequence
  Synthetic
cgutcagcacucaccaaagg

SEQ ID NO: 102611 - DNA, 17 bp, Artificial Sequence
  Synthetic
tcagcaccguggugcag

SEQ ID NO: 102612 - DNA, 22 bp, Artificial Sequence
  Synthetic
ccagutcacaaaaguccagcac

SEQ ID NO: 102613 - DNA, 24 bp, Artificial Sequence
  Synthetic
gagactgtcccugagtggtauaga

SEQ ID NO: 102614 - DNA, 18 bp, Artificial Sequence
  Synthetic
ccggatcuccacgtcgua

SEQ ID NO: 102615 - DNA, 21 bp, Artificial Sequence
  Synthetic
gccucgcugacagaagagaag

SEQ ID NO: 102616 - DNA, 22 bp, Artificial Sequence
  Synthetic
accaauacgggagaagucagga

SEQ ID NO: 102617 - DNA, 21 bp, Artificial Sequence
  Synthetic
ctgagaccaaguctgcugcaa

SEQ ID NO: 102618 - DNA, 20 bp, Artificial Sequence
  Synthetic
tcaccgtgutcagcgagtuc

SEQ ID NO: 102619 - DNA, 21 bp, Artificial Sequence
  Synthetic
tgatgtacgcgugcatctcuc

SEQ ID NO: 102620 - DNA, 24 bp, Artificial Sequence
  Synthetic
catgctcacugctttcttctugag

SEQ ID NO: 102621 - DNA, 20 bp, Artificial Sequence
  Synthetic
ccgtggtgucagagcagaug

SEQ ID NO: 102622 - DNA, 22 bp, Artificial Sequence
  Synthetic
catcugggaaggacucaagcag

SEQ ID NO: 102623 - DNA, 27 bp, Artificial Sequence
  Synthetic
caatgagcccuttggttttcttgtuaa

SEQ ID NO: 102624 - DNA, 21 bp, Artificial Sequence
  Synthetic
gggaggatugcagcagactug

SEQ ID NO: 102625 - DNA, 24 bp, Artificial Sequence
  Synthetic
ctgaccutgtgttttuacgggaag

SEQ ID NO: 102626 - DNA, 19 bp, Artificial Sequence
  Synthetic
caugcaugggacaggcaga

SEQ ID NO: 102627 - DNA, 21 bp, Artificial Sequence
  Synthetic
cctaaccctaugctcgcctut

SEQ ID NO: 102628 - DNA, 20 bp, Artificial Sequence
  Synthetic
tgtcacccucactguagcga

SEQ ID NO: 102629 - DNA, 22 bp, Artificial Sequence
  Synthetic
ggaaaccugacctucccaagag

SEQ ID NO: 102630 - DNA, 19 bp, Artificial Sequence
  Synthetic
accugcacaggactgctug

SEQ ID NO: 102631 - DNA, 17 bp, Artificial Sequence
  Synthetic
cccgacggcaccaucut

SEQ ID NO: 102632 - DNA, 22 bp, Artificial Sequence
  Synthetic
catgccatugactttgcctgut

SEQ ID NO: 102633 - DNA, 23 bp, Artificial Sequence
  Synthetic
ccttgaactcugccgaggttauc

SEQ ID NO: 102634 - DNA, 33 bp, Artificial Sequence
  Synthetic
taattagtgttaucccgaataatacatguacag

SEQ ID NO: 102635 - DNA, 27 bp, Artificial Sequence
  Synthetic
tggactactcugagcaatatcgaauca

SEQ ID NO: 102636 - DNA, 21 bp, Artificial Sequence
  Synthetic
tcaacccccucactgagtcut

SEQ ID NO: 102637 - DNA, 21 bp, Artificial Sequence
  Synthetic
agagacgtcutcagctccuca

SEQ ID NO: 102638 - DNA, 28 bp, Artificial Sequence
  Synthetic
acctacatttcugcctctacactuaaag

SEQ ID NO: 102639 - DNA, 27 bp, Artificial Sequence
  Synthetic
ttggacgatagugctttgaaaagtcua

SEQ ID NO: 102640 - DNA, 25 bp, Artificial Sequence
  Synthetic
gcactctttgaugggctttctcaua

SEQ ID NO: 102641 - DNA, 22 bp, Artificial Sequence
  Synthetic
cttttgccaaagaagugggcut

SEQ ID NO: 102642 - DNA, 21 bp, Artificial Sequence
  Synthetic
caaggtgggcutcaagguagg

SEQ ID NO: 102643 - DNA, 21 bp, Artificial Sequence
  Synthetic
tcaggacaccagguagccaua

SEQ ID NO: 102644 - DNA, 23 bp, Artificial Sequence
  Synthetic
tgatttcctgtugcccctcttuc

SEQ ID NO: 102645 - DNA, 27 bp, Artificial Sequence
  Synthetic
guctccttgaagtucaacaagaaaacc

SEQ ID NO: 102646 - DNA, 24 bp, Artificial Sequence
  Synthetic
gtcgcagaucacgaggtgaaatua

SEQ ID NO: 102647 - DNA, 24 bp, Artificial Sequence
  Synthetic
gtggaggttutagcttttgtgugg

SEQ ID NO: 102648 - DNA, 28 bp, Artificial Sequence
  Synthetic
actgaattatctuccacggcaaaatcua

SEQ ID NO: 102649 - DNA, 27 bp, Artificial Sequence
  Synthetic
catcctgtgcuttttaaggaaagtugt

SEQ ID NO: 102650 - DNA, 22 bp, Artificial Sequence
  Synthetic
gtaaggccaucaatgagcccut

SEQ ID NO: 102651 - DNA, 24 bp, Artificial Sequence
  Synthetic
agccaatcagcaucatcatcauca

SEQ ID NO: 102652 - DNA, 21 bp, Artificial Sequence
  Synthetic
gcaatugctcactucaagcga

SEQ ID NO: 102653 - DNA, 25 bp, Artificial Sequence
  Synthetic
gttggagcttugaccttttgctuac

SEQ ID NO: 102654 - DNA, 28 bp, Artificial Sequence
  Synthetic
gatttctccccacautctccatattgut

SEQ ID NO: 102655 - DNA, 26 bp, Artificial Sequence
  Synthetic
agtccttcctcaugatagtcttccug

SEQ ID NO: 102656 - DNA, 29 bp, Artificial Sequence
  Synthetic
ccatctatccgcuctaaatatccttctuc

SEQ ID NO: 102657 - DNA, 26 bp, Artificial Sequence
  Synthetic
tttagaucaaaaggtccctucagcaa

SEQ ID NO: 102658 - DNA, 26 bp, Artificial Sequence
  Synthetic
agagactattcaugcccttacacuga

SEQ ID NO: 102659 - DNA, 23 bp, Artificial Sequence
  Synthetic
gctgaattugcgacctgtagaug

SEQ ID NO: 102660 - DNA, 24 bp, Artificial Sequence
  Synthetic
cttctcatgtgutggctacaggua

SEQ ID NO: 102661 - DNA, 21 bp, Artificial Sequence
  Synthetic
gcactggcuggaagaactcug

SEQ ID NO: 102662 - DNA, 23 bp, Artificial Sequence
  Synthetic
ccagcgcaaacautctggatcua

SEQ ID NO: 102663 - DNA, 28 bp, Artificial Sequence
  Synthetic
gggtctcatcuccacattcatttttaug

SEQ ID NO: 102664 - DNA, 24 bp, Artificial Sequence
  Synthetic
atgctaattuggtgccatttuggt

SEQ ID NO: 102665 - DNA, 26 bp, Artificial Sequence
  Synthetic
tcagtaacgacauccttgttuccaat

SEQ ID NO: 102666 - DNA, 30 bp, Artificial Sequence
  Synthetic
ttactgctuaacccacaatgtaattaauct

SEQ ID NO: 102667 - DNA, 28 bp, Artificial Sequence
  Synthetic
gccaggaaatcaugactgagaaagauat

SEQ ID NO: 102668 - DNA, 21 bp, Artificial Sequence
  Synthetic
acctaccccagacucctcuct

SEQ ID NO: 102669 - DNA, 23 bp, Artificial Sequence
  Synthetic
caagggattuggctttagcctuc

SEQ ID NO: 102670 - DNA, 21 bp, Artificial Sequence
  Synthetic
ggctctggcucctctcaagua

SEQ ID NO: 102671 - DNA, 28 bp, Artificial Sequence
  Synthetic
gactataacuttctgactgugaaggagt

SEQ ID NO: 102672 - DNA, 29 bp, Artificial Sequence
  Synthetic
tcaaacaagaaagugcagatgtaaatgug

SEQ ID NO: 102673 - DNA, 24 bp, Artificial Sequence
  Synthetic
cttgctacuacaatgtgggaucct

SEQ ID NO: 102674 - DNA, 23 bp, Artificial Sequence
  Synthetic
catgttatactcucggcctccuc

SEQ ID NO: 102675 - DNA, 26 bp, Artificial Sequence
  Synthetic
gccttttugccaagaatgttuaggaa

SEQ ID NO: 102676 - DNA, 27 bp, Artificial Sequence
  Synthetic
ctaaagttcaguagcaaacatgctuca

SEQ ID NO: 102677 - DNA, 27 bp, Artificial Sequence
  Synthetic
accattttcaauctgttgtttctugcc

SEQ ID NO: 102678 - DNA, 28 bp, Artificial Sequence
  Synthetic
agtgcttgttctuggatatcacgaaaua

SEQ ID NO: 102679 - DNA, 24 bp, Artificial Sequence
  Synthetic
gggacagtuaacatgtgagctcut

SEQ ID NO: 102680 - DNA, 21 bp, Artificial Sequence
  Synthetic
gtcactgucgccaatttgcut

SEQ ID NO: 102681 - DNA, 29 bp, Artificial Sequence
  Synthetic
gagaaaagagacuggatttggattuagga

SEQ ID NO: 102682 - DNA, 28 bp, Artificial Sequence
  Synthetic
aaagaattttuggccttttacagtuggt

SEQ ID NO: 102683 - DNA, 23 bp, Artificial Sequence
  Synthetic
accttttggcautctggaaagug

SEQ ID NO: 102684 - DNA, 20 bp, Artificial Sequence
  Synthetic
actctgcucgagguccaaga

SEQ ID NO: 102685 - DNA, 27 bp, Artificial Sequence
  Synthetic
tgatggtttgtugtgcctttgtattut

SEQ ID NO: 102686 - DNA, 28 bp, Artificial Sequence
  Synthetic
agcacagaaacaccuagtattgatugag

SEQ ID NO: 102687 - DNA, 22 bp, Artificial Sequence
  Synthetic
tctctgactgutcttggtgcug

SEQ ID NO: 102688 - DNA, 24 bp, Artificial Sequence
  Synthetic
cagctctauaaaccccgaagcaua

SEQ ID NO: 102689 - DNA, 21 bp, Artificial Sequence
  Synthetic
gccacggcagacucctuaaag

SEQ ID NO: 102690 - DNA, 25 bp, Artificial Sequence
  Synthetic
atttcatauggaatgctgugaccca

SEQ ID NO: 102691 - DNA, 24 bp, Artificial Sequence
  Synthetic
aacctgtataccuctgagctguca

SEQ ID NO: 102692 - DNA, 22 bp, Artificial Sequence
  Synthetic
ccuggttcattuccacccagaa

SEQ ID NO: 102693 - DNA, 23 bp, Artificial Sequence
  Synthetic
gtcctgcaacugtgttcatctug

SEQ ID NO: 102694 - DNA, 20 bp, Artificial Sequence
  Synthetic
cctugactagacugcagcga

SEQ ID NO: 102695 - DNA, 21 bp, Artificial Sequence
  Synthetic
tgttacuagggcctgctucct

SEQ ID NO: 102696 - DNA, 28 bp, Artificial Sequence
  Synthetic
tccatctttaacacucaactccaatugt

SEQ ID NO: 102697 - DNA, 23 bp, Artificial Sequence
  Synthetic
agtggatttuggaggccaucaaa

SEQ ID NO: 102698 - DNA, 26 bp, Artificial Sequence
  Synthetic
cagtaatgcauccacacatagcaauc

SEQ ID NO: 102699 - DNA, 28 bp, Artificial Sequence
  Synthetic
gggatgaggccugaatactaattcaaut

SEQ ID NO: 102700 - DNA, 24 bp, Artificial Sequence
  Synthetic
acgctgtttcugctttttcactut

SEQ ID NO: 102701 - DNA, 28 bp, Artificial Sequence
  Synthetic
catcaggataagggauaacgactctaug

SEQ ID NO: 102702 - DNA, 26 bp, Artificial Sequence
  Synthetic
acttagagacacuttgccattgaucc

SEQ ID NO: 102703 - DNA, 25 bp, Artificial Sequence
  Synthetic
gtgattgccuactgttagctcuagt

SEQ ID NO: 102704 - DNA, 24 bp, Artificial Sequence
  Synthetic
tccagtaatggauggtgctaguga

SEQ ID NO: 102705 - DNA, 28 bp, Artificial Sequence
  Synthetic
agactgccttutacctccaaatuaaaca

SEQ ID NO: 102706 - DNA, 23 bp, Artificial Sequence
  Synthetic
gttgagccgauaaagagguccat

SEQ ID NO: 102707 - DNA, 27 bp, Artificial Sequence
  Synthetic
ctcaacttugaaaagcattgaacgtut

SEQ ID NO: 102708 - DNA, 25 bp, Artificial Sequence
  Synthetic
gtcactggugaaagaaccaaaaugt

SEQ ID NO: 102709 - DNA, 28 bp, Artificial Sequence
  Synthetic
gaggagtaccagguttggatttcataut

SEQ ID NO: 102710 - DNA, 19 bp, Artificial Sequence
  Synthetic
tggaagacugtggccggua

SEQ ID NO: 102711 - DNA, 26 bp, Artificial Sequence
  Synthetic
cattcaagutatacaccugccagact

SEQ ID NO: 102712 - DNA, 25 bp, Artificial Sequence
  Synthetic
gaaggaggaacaagaaaucctguca

SEQ ID NO: 102713 - DNA, 25 bp, Artificial Sequence
  Synthetic
cttcactgctcuctttagacagcuc

SEQ ID NO: 102714 - DNA, 28 bp, Artificial Sequence
  Synthetic
ccatagcactucccttccaaatacuaaa

SEQ ID NO: 102715 - DNA, 26 bp, Artificial Sequence
  Synthetic
cccttggcagucatcttagtcatuac

SEQ ID NO: 102716 - DNA, 23 bp, Artificial Sequence
  Synthetic
ggaaggaggccutttctgugaat

SEQ ID NO: 102717 - DNA, 26 bp, Artificial Sequence
  Synthetic
cagtaattggaaaaucacaccagcut

SEQ ID NO: 102718 - DNA, 21 bp, Artificial Sequence
  Synthetic
ccacagaccacccucctttuc

SEQ ID NO: 102719 - DNA, 18 bp, Artificial Sequence
  Synthetic
ggagcugcttcuggaggt

SEQ ID NO: 102720 - DNA, 17 bp, Artificial Sequence
  Synthetic
cgcuccgacguacggaa

SEQ ID NO: 102721 - DNA, 23 bp, Artificial Sequence
  Synthetic
gggtgtaacucatcatguccaaa

SEQ ID NO: 102722 - DNA, 26 bp, Artificial Sequence
  Synthetic
gtccagtaacuggtttctgagaauca

SEQ ID NO: 102723 - DNA, 28 bp, Artificial Sequence
  Synthetic
ctttagaatgggaguatcacagtgucat

SEQ ID NO: 102724 - DNA, 26 bp, Artificial Sequence
  Synthetic
cagacacatccutctgaccttucaaa

SEQ ID NO: 102725 - DNA, 20 bp, Artificial Sequence
  Synthetic
cctgggcgaauagcactucc

SEQ ID NO: 102726 - DNA, 24 bp, Artificial Sequence
  Synthetic
ccagtggtucttcttctggaucac

SEQ ID NO: 102727 - DNA, 24 bp, Artificial Sequence
  Synthetic
tgccaagtttcuctctcctgttut

SEQ ID NO: 102728 - DNA, 20 bp, Artificial Sequence
  Synthetic
agacagaggccaggaugcua

SEQ ID NO: 102729 - DNA, 17 bp, Artificial Sequence
  Synthetic
ggtgcuccccgagtucc

SEQ ID NO: 102730 - DNA, 21 bp, Artificial Sequence
  Synthetic
gctgcuggagctgtcuaaaga

SEQ ID NO: 102731 - DNA, 22 bp, Artificial Sequence
  Synthetic
ctgtggttucgtcaatctuggg

SEQ ID NO: 102732 - DNA, 24 bp, Artificial Sequence
  Synthetic
aattttccatggutccgaggctua

SEQ ID NO: 102733 - DNA, 27 bp, Artificial Sequence
  Synthetic
tggcttggaucgtaaaactgtttuaga

SEQ ID NO: 102734 - DNA, 26 bp, Artificial Sequence
  Synthetic
gctgtcuaaagagagcagugaagaag

SEQ ID NO: 102735 - DNA, 20 bp, Artificial Sequence
  Synthetic
gcaactgacugtggttucgt

SEQ ID NO: 102736 - DNA, 22 bp, Artificial Sequence
  Synthetic
cttgtugcataagcuggaccac

SEQ ID NO: 102737 - DNA, 28 bp, Artificial Sequence
  Synthetic
gcaatgtttcauccatcgttcaatuact

SEQ ID NO: 102738 - DNA, 26 bp, Artificial Sequence
  Synthetic
cagtctggaauactctgtccattugt

SEQ ID NO: 102739 - DNA, 27 bp, Artificial Sequence
  Synthetic
actctgtataaagugggtttgcaagut

SEQ ID NO: 102740 - DNA, 22 bp, Artificial Sequence
  Synthetic
tcagtttgauctggagctuggg

SEQ ID NO: 102741 - DNA, 23 bp, Artificial Sequence
  Synthetic
cccctctcacutgcttacttuca

SEQ ID NO: 102742 - DNA, 21 bp, Artificial Sequence
  Synthetic
agaggcuggtaagacacuggt

SEQ ID NO: 102743 - DNA, 23 bp, Artificial Sequence
  Synthetic
gcagagtucgtctgtttcugaag

SEQ ID NO: 102744 - DNA, 28 bp, Artificial Sequence
  Synthetic
tgaagaagtcattugtcaaccatgguaa

SEQ ID NO: 102745 - DNA, 25 bp, Artificial Sequence
  Synthetic
cagagacugtcttcttauccaaccc

SEQ ID NO: 102746 - DNA, 20 bp, Artificial Sequence
  Synthetic
ctgggcgcutttcatcagut

SEQ ID NO: 102747 - DNA, 28 bp, Artificial Sequence
  Synthetic
gatactuctctatgttctucagggagga

SEQ ID NO: 102748 - DNA, 21 bp, Artificial Sequence
  Synthetic
catgcggucagtactucccat

SEQ ID NO: 102749 - DNA, 24 bp, Artificial Sequence
  Synthetic
tgacttaggaaaagugcctggtut

SEQ ID NO: 102750 - DNA, 27 bp, Artificial Sequence
  Synthetic
ttaacaaaggaaaccagucatgtcuga

SEQ ID NO: 102751 - DNA, 28 bp, Artificial Sequence
  Synthetic
cttcatttctttaugctctgtccctcut

SEQ ID NO: 102752 - DNA, 20 bp, Artificial Sequence
  Synthetic
ggactugaggagccgaaugg

SEQ ID NO: 102753 - DNA, 20 bp, Artificial Sequence
  Synthetic
gtactgcgguccgtcttuca

SEQ ID NO: 102754 - DNA, 21 bp, Artificial Sequence
  Synthetic
ggttggaaugtgacucagcgt

SEQ ID NO: 102755 - DNA, 19 bp, Artificial Sequence
  Synthetic
cggucccuggacaaaagga

SEQ ID NO: 102756 - DNA, 26 bp, Artificial Sequence
  Synthetic
auggtgcuaaaagccaagaaaaagag

SEQ ID NO: 102757 - DNA, 21 bp, Artificial Sequence
  Synthetic
cagactccaugtggctgucat

SEQ ID NO: 102758 - DNA, 21 bp, Artificial Sequence
  Synthetic
ctaagcuctgggaaugccaca

SEQ ID NO: 102759 - DNA, 22 bp, Artificial Sequence
  Synthetic
ctccaagaugacgctctuccaa

SEQ ID NO: 102760 - DNA, 23 bp, Artificial Sequence
  Synthetic
cgctgtgaauaatgggaggtuac

SEQ ID NO: 102761 - DNA, 24 bp, Artificial Sequence
  Synthetic
gcacgaacatuactccttcgctua

SEQ ID NO: 102762 - DNA, 20 bp, Artificial Sequence
  Synthetic
gctggctcugtcctctcugt

SEQ ID NO: 102763 - DNA, 17 bp, Artificial Sequence
  Synthetic
gcggagacgguctcugg

SEQ ID NO: 102764 - DNA, 24 bp, Artificial Sequence
  Synthetic
catggaaaucgactctgagacugt

SEQ ID NO: 102765 - DNA, 17 bp, Artificial Sequence
  Synthetic
tggcaaucgucgagcgt

SEQ ID NO: 102766 - DNA, 25 bp, Artificial Sequence
  Synthetic
tgcccatggutatgctttcuaagac

SEQ ID NO: 102767 - DNA, 22 bp, Artificial Sequence
  Synthetic
ccacttagauagaccgcgctut

SEQ ID NO: 102768 - DNA, 21 bp, Artificial Sequence
  Synthetic
cagcugctcctauagcaacct

SEQ ID NO: 102769 - DNA, 18 bp, Artificial Sequence
  Synthetic
gaggccucuccaccacac

SEQ ID NO: 102770 - DNA, 20 bp, Artificial Sequence
  Synthetic
aggaccaugatgccgaugac

SEQ ID NO: 102771 - DNA, 22 bp, Artificial Sequence
  Synthetic
gccacaguccattaagaccuct

SEQ ID NO: 102772 - DNA, 21 bp, Artificial Sequence
  Synthetic
gcagcgucaagtctccucaag

SEQ ID NO: 102773 - DNA, 20 bp, Artificial Sequence
  Synthetic
ctctgacccautcgctcgua

SEQ ID NO: 102774 - DNA, 22 bp, Artificial Sequence
  Synthetic
cctctttugcaacggaacaugg

SEQ ID NO: 102775 - DNA, 19 bp, Artificial Sequence
  Synthetic
tcugggagcgcccauagat

SEQ ID NO: 102776 - DNA, 20 bp, Artificial Sequence
  Synthetic
gcaacgccaacautggctua

SEQ ID NO: 102777 - DNA, 28 bp, Artificial Sequence
  Synthetic
gctgtaaggcaaugaatgatcaauaagt

SEQ ID NO: 102778 - DNA, 23 bp, Artificial Sequence
  Synthetic
aaacaaguguggccaaaaggaac

SEQ ID NO: 102779 - DNA, 23 bp, Artificial Sequence
  Synthetic
ggctggttttuccttctgaaguc

SEQ ID NO: 102780 - DNA, 21 bp, Artificial Sequence
  Synthetic
ccgtctctccuacctggcaua

SEQ ID NO: 102781 - DNA, 22 bp, Artificial Sequence
  Synthetic
tcttgtcgaucatgtggaggug

SEQ ID NO: 102782 - DNA, 21 bp, Artificial Sequence
  Synthetic
accaaaguccacagatugcca

SEQ ID NO: 102783 - DNA, 22 bp, Artificial Sequence
  Synthetic
ggcactttgauctgggctgaut

SEQ ID NO: 102784 - DNA, 21 bp, Artificial Sequence
  Synthetic
ttaatgugcagcctggucact

SEQ ID NO: 102785 - DNA, 23 bp, Artificial Sequence
  Synthetic
gttcttttggucctgcttctgug

SEQ ID NO: 102786 - DNA, 26 bp, Artificial Sequence
  Synthetic
gccaaacugcagcagttaactaauac

SEQ ID NO: 102787 - DNA, 23 bp, Artificial Sequence
  Synthetic
ggagtguggagactgagaaagut

SEQ ID NO: 102788 - DNA, 21 bp, Artificial Sequence
  Synthetic
acatgacatugccaccacuct

SEQ ID NO: 102789 - DNA, 27 bp, Artificial Sequence
  Synthetic
actgttagggaaccucagtcttuaact

SEQ ID NO: 102790 - DNA, 20 bp, Artificial Sequence
  Synthetic
ctgccacccaucagucacaa

SEQ ID NO: 102791 - DNA, 22 bp, Artificial Sequence
  Synthetic
ccattcauggcgttgagagugt

SEQ ID NO: 102792 - DNA, 20 bp, Artificial Sequence
  Synthetic
gcttggcuaggctgaaggug

SEQ ID NO: 102793 - DNA, 19 bp, Artificial Sequence
  Synthetic
cccgctgucacagtguagt

SEQ ID NO: 102794 - DNA, 24 bp, Artificial Sequence
  Synthetic
gguaacaguggaagaacagaagga

SEQ ID NO: 102795 - DNA, 24 bp, Artificial Sequence
  Synthetic
ttctggttttucacctggtgaugt

SEQ ID NO: 102796 - DNA, 20 bp, Artificial Sequence
  Synthetic
tcttcguggtcgtccucaga

SEQ ID NO: 102797 - DNA, 24 bp, Artificial Sequence
  Synthetic
agcctggtgutcaagagtctttut

SEQ ID NO: 102798 - DNA, 18 bp, Artificial Sequence
  Synthetic
ggctgcugctgctggtua

SEQ ID NO: 102799 - DNA, 18 bp, Artificial Sequence
  Synthetic
gtccuccagcagccucac

SEQ ID NO: 102800 - DNA, 22 bp, Artificial Sequence
  Synthetic
ccctgctcuggaaaacagcuac

SEQ ID NO: 102801 - DNA, 21 bp, Artificial Sequence
  Synthetic
tcgatacugcccaggtcacua

SEQ ID NO: 102802 - DNA, 21 bp, Artificial Sequence
  Synthetic
tguacccgaatcugacgagga

SEQ ID NO: 102803 - DNA, 23 bp, Artificial Sequence
  Synthetic
ctctccugggtcaaagacugaac

SEQ ID NO: 102804 - DNA, 25 bp, Artificial Sequence
  Synthetic
accattaaguaacacagggcttgut

SEQ ID NO: 102805 - DNA, 26 bp, Artificial Sequence
  Synthetic
gtgagagaugccaatatttgaugcag

SEQ ID NO: 102806 - DNA, 21 bp, Artificial Sequence
  Synthetic
tgtgccccugtaaguccaaac

SEQ ID NO: 102807 - DNA, 27 bp, Artificial Sequence
  Synthetic
gcttttagcaccauctggatcttttuc

SEQ ID NO: 102808 - DNA, 28 bp, Artificial Sequence
  Synthetic
cttttccctacucttctgcatatuagca

SEQ ID NO: 102809 - DNA, 18 bp, Artificial Sequence
  Synthetic
cugcagagacugcccaga

SEQ ID NO: 102810 - DNA, 26 bp, Artificial Sequence
  Synthetic
tgtcaactctgugaacatgaacauga

SEQ ID NO: 102811 - DNA, 21 bp, Artificial Sequence
  Synthetic
ccatcugcatctgcauagggt

SEQ ID NO: 102812 - DNA, 18 bp, Artificial Sequence
  Synthetic
cagcgucgtggtcgucat

SEQ ID NO: 102813 - DNA, 24 bp, Artificial Sequence
  Synthetic
aauagtccugagaccgaaaccaag

SEQ ID NO: 102814 - DNA, 27 bp, Artificial Sequence
  Synthetic
agatgatcucatcaaaccugaggaaga

SEQ ID NO: 102815 - DNA, 25 bp, Artificial Sequence
  Synthetic
tctttttccguggagatttctggut

SEQ ID NO: 102816 - DNA, 20 bp, Artificial Sequence
  Synthetic
cgtcattcugggcagtcuct

SEQ ID NO: 102817 - DNA, 21 bp, Artificial Sequence
  Synthetic
gcagacagcagcaauagucct

SEQ ID NO: 102818 - DNA, 25 bp, Artificial Sequence
  Synthetic
ggcuatatgaaucaaacgccccaat

SEQ ID NO: 102819 - DNA, 22 bp, Artificial Sequence
  Synthetic
gagagacugtttggacaugcct

SEQ ID NO: 102820 - DNA, 23 bp, Artificial Sequence
  Synthetic
cagcaagtcguagacagtggaut

SEQ ID NO: 102821 - DNA, 21 bp, Artificial Sequence
  Synthetic
ctctgtgucagactgcuggag

SEQ ID NO: 102822 - DNA, 23 bp, Artificial Sequence
  Synthetic
actcagtguccaaatccaggtut

SEQ ID NO: 102823 - DNA, 23 bp, Artificial Sequence
  Synthetic
gtctaacatccutctccggctug

SEQ ID NO: 102824 - DNA, 27 bp, Artificial Sequence
  Synthetic
ttgcaggtuaaaagaatggcaaatuca

SEQ ID NO: 102825 - DNA, 28 bp, Artificial Sequence
  Synthetic
agtggttgtatguaaaaactgccaagua

SEQ ID NO: 102826 - DNA, 22 bp, Artificial Sequence
  Synthetic
cctgagatgcugttcctgaugt

SEQ ID NO: 102827 - DNA, 23 bp, Artificial Sequence
  Synthetic
agccagggugatgacattaccua

SEQ ID NO: 102828 - DNA, 20 bp, Artificial Sequence
  Synthetic
gaatcgggcaccacucacut

SEQ ID NO: 102829 - DNA, 24 bp, Artificial Sequence
  Synthetic
tcatgtctcuctccttccucacag

SEQ ID NO: 102830 - DNA, 25 bp, Artificial Sequence
  Synthetic
aatgacttcgaggucttgaatgugt

SEQ ID NO: 102831 - DNA, 19 bp, Artificial Sequence
  Synthetic
gccagagguccagguggaa

SEQ ID NO: 102832 - DNA, 20 bp, Artificial Sequence
  Synthetic
cttgttggccugtgggtuac

SEQ ID NO: 102833 - DNA, 20 bp, Artificial Sequence
  Synthetic
gatctgtgaugcagcccuct

SEQ ID NO: 102834 - DNA, 17 bp, Artificial Sequence
  Synthetic
cuctgccagucgcccaa

SEQ ID NO: 102835 - DNA, 24 bp, Artificial Sequence
  Synthetic
acaatctaugccctctgctttucc

SEQ ID NO: 102836 - DNA, 20 bp, Artificial Sequence
  Synthetic
gagtccaucaactgcugcct

SEQ ID NO: 102837 - DNA, 18 bp, Artificial Sequence
  Synthetic
gcaguagccgcccttcug

SEQ ID NO: 102838 - DNA, 20 bp, Artificial Sequence
  Synthetic
tccaaacacuacgccugcat

SEQ ID NO: 102839 - DNA, 23 bp, Artificial Sequence
  Synthetic
ctgggaagagutagtguccaagg

SEQ ID NO: 102840 - DNA, 28 bp, Artificial Sequence
  Synthetic
agcagaaagaagaaagguaaactggaut

SEQ ID NO: 102841 - DNA, 24 bp, Artificial Sequence
  Synthetic
gtgcctcugcaaacttttcctuag

SEQ ID NO: 102842 - DNA, 21 bp, Artificial Sequence
  Synthetic
cagccaagcauccaccuagaa

SEQ ID NO: 102843 - DNA, 21 bp, Artificial Sequence
  Synthetic
agtatgcaugggagccacauc

SEQ ID NO: 102844 - DNA, 22 bp, Artificial Sequence
  Synthetic
gcagtagcgagucacgtagtug

SEQ ID NO: 102845 - DNA, 20 bp, Artificial Sequence
  Synthetic
cctggaagcutggcugagag

SEQ ID NO: 102846 - DNA, 20 bp, Artificial Sequence
  Synthetic
gcatugagccgaagctccuc

SEQ ID NO: 102847 - DNA, 22 bp, Artificial Sequence
  Synthetic
gggcttctguccatctctttuc

SEQ ID NO: 102848 - DNA, 24 bp, Artificial Sequence
  Synthetic
ctgtggcatcugcacaaagtttua

SEQ ID NO: 102849 - DNA, 27 bp, Artificial Sequence
  Synthetic
gctcaaagtaaugaagaggtggtucaa

SEQ ID NO: 102850 - DNA, 28 bp, Artificial Sequence
  Synthetic
gctgtatggtautttaacagtaccugct

SEQ ID NO: 102851 - DNA, 27 bp, Artificial Sequence
  Synthetic
gcagctaucaaagcaatatucaagcat

SEQ ID NO: 102852 - DNA, 33 bp, Artificial Sequence
  Synthetic
tccatcgtagatauaaacttagaattggattut

SEQ ID NO: 102853 - DNA, 23 bp, Artificial Sequence
  Synthetic
tcauccggaattugggagaacac

SEQ ID NO: 102854 - DNA, 26 bp, Artificial Sequence
  Synthetic
gcttttcttcaucaatgtgttcuccc

SEQ ID NO: 102855 - DNA, 26 bp, Artificial Sequence
  Synthetic
ttgtgttgcuaccacatttttgtgut

SEQ ID NO: 102856 - DNA, 17 bp, Artificial Sequence
  Synthetic
agcggcaaugaccccut

SEQ ID NO: 102857 - DNA, 19 bp, Artificial Sequence
  Synthetic
caggagcgcutaccgaugt

SEQ ID NO: 102858 - DNA, 24 bp, Artificial Sequence
  Synthetic
gaagagacgaugaatgaggtccut

SEQ ID NO: 102859 - DNA, 24 bp, Artificial Sequence
  Synthetic
gcatcttuggcttgatttauggct

SEQ ID NO: 102860 - DNA, 21 bp, Artificial Sequence
  Synthetic
ctctggttugccactggtgua

SEQ ID NO: 102861 - DNA, 28 bp, Artificial Sequence
  Synthetic
gccttctgaacautccaaaagtttugac

SEQ ID NO: 102862 - DNA, 27 bp, Artificial Sequence
  Synthetic
gggaaagaagaagucatgatgttccut

SEQ ID NO: 102863 - DNA, 25 bp, Artificial Sequence
  Synthetic
cctagaagcuagagttggccatuac

SEQ ID NO: 102864 - DNA, 28 bp, Artificial Sequence
  Synthetic
gaattgttcataccutagtcgtccacut

SEQ ID NO: 102865 - DNA, 26 bp, Artificial Sequence
  Synthetic
gatcatttagtcaucttcagccgcua

SEQ ID NO: 102866 - DNA, 21 bp, Artificial Sequence
  Synthetic
gggcagauccagtgttctgug

SEQ ID NO: 102867 - DNA, 28 bp, Artificial Sequence
  Synthetic
agcatctattttcutgactttccccaut

SEQ ID NO: 102868 - DNA, 27 bp, Artificial Sequence
  Synthetic
ccttcagucaacaaagccaattatuga

SEQ ID NO: 102869 - DNA, 27 bp, Artificial Sequence
  Synthetic
cctgctuaccccaaaacaaataaucac

SEQ ID NO: 102870 - DNA, 27 bp, Artificial Sequence
  Synthetic
aagtatagtccuaccactgggtugaat

SEQ ID NO: 102871 - DNA, 27 bp, Artificial Sequence
  Synthetic
catactgtgaatcugggttcttcctut

SEQ ID NO: 102872 - DNA, 20 bp, Artificial Sequence
  Synthetic
aggagagcugcttcgtgaug

SEQ ID NO: 102873 - DNA, 23 bp, Artificial Sequence
  Synthetic
ctggttggcautcacactcctua

SEQ ID NO: 102874 - DNA, 27 bp, Artificial Sequence
  Synthetic
tcctttaggaaauggatcagacaaugg

SEQ ID NO: 102875 - DNA, 28 bp, Artificial Sequence
  Synthetic
aaaaagagaacgaaagauacatcugcct

SEQ ID NO: 102876 - DNA, 24 bp, Artificial Sequence
  Synthetic
caaggauggaacaagaccauggat

SEQ ID NO: 102877 - DNA, 26 bp, Artificial Sequence
  Synthetic
agttgacuaacagttgctuaaagcct

SEQ ID NO: 102878 - DNA, 22 bp, Artificial Sequence
  Synthetic
ctgactugcactctgucacact

SEQ ID NO: 102879 - DNA, 24 bp, Artificial Sequence
  Synthetic
gttacctttagcugaccccttucc

SEQ ID NO: 102880 - DNA, 26 bp, Artificial Sequence
  Synthetic
ctctccttgtuttcttctttccucct

SEQ ID NO: 102881 - DNA, 20 bp, Artificial Sequence
  Synthetic
ccagugaccccagagctuac

SEQ ID NO: 102882 - DNA, 17 bp, Artificial Sequence
  Synthetic
gtcagcucccucagcgt

SEQ ID NO: 102883 - DNA, 19 bp, Artificial Sequence
  Synthetic
gaccagcggcutcaugaga

SEQ ID NO: 102884 - DNA, 21 bp, Artificial Sequence
  Synthetic
ccgattcucctctgctcucca

SEQ ID NO: 102885 - DNA, 17 bp, Artificial Sequence
  Synthetic
gcccgcaucccgucaag

SEQ ID NO: 102886 - DNA, 21 bp, Artificial Sequence
  Synthetic
cagcucagcaggagtaaggut

SEQ ID NO: 102887 - DNA, 19 bp, Artificial Sequence
  Synthetic
ctggagugcccacagucag

SEQ ID NO: 102888 - DNA, 22 bp, Artificial Sequence
  Synthetic
gcaacucatcccucacaagcaa

SEQ ID NO: 102889 - DNA, 22 bp, Artificial Sequence
  Synthetic
aacaagccucagtgtgauggag

SEQ ID NO: 102890 - DNA, 23 bp, Artificial Sequence
  Synthetic
tgaacuccagcaaatcaguccat

SEQ ID NO: 102891 - DNA, 28 bp, Artificial Sequence
  Synthetic
cagatctggugatctatgtcuacacaaa

SEQ ID NO: 102892 - DNA, 28 bp, Artificial Sequence
  Synthetic
gggaaatgcttuctatattctgtgtuct

SEQ ID NO: 102893 - DNA, 20 bp, Artificial Sequence
  Synthetic
gggcaagcaugcugaacaat

SEQ ID NO: 102894 - DNA, 26 bp, Artificial Sequence
  Synthetic
catccacattuactctaggccttucc

SEQ ID NO: 102895 - DNA, 25 bp, Artificial Sequence
  Synthetic
gctgttcaagaacuacacttgucct

SEQ ID NO: 102896 - DNA, 23 bp, Artificial Sequence
  Synthetic
cccccatcucatcaaggagaauc

SEQ ID NO: 102897 - DNA, 26 bp, Artificial Sequence
  Synthetic
ggtaaggucaaagccctaaaatucct

SEQ ID NO: 102898 - DNA, 21 bp, Artificial Sequence
  Synthetic
gcagatccuggtgggtgtauc

SEQ ID NO: 102899 - DNA, 22 bp, Artificial Sequence
  Synthetic
acttgttugtgtgtgucaccct

SEQ ID NO: 102900 - DNA, 28 bp, Artificial Sequence
  Synthetic
cctcaaattcacauttgctcctctctua

SEQ ID NO: 102901 - DNA, 23 bp, Artificial Sequence
  Synthetic
cgtgaagcugctgaaactttucc

SEQ ID NO: 102902 - DNA, 21 bp, Artificial Sequence
  Synthetic
ccaaacacgcutccagaguct

SEQ ID NO: 102903 - DNA, 23 bp, Artificial Sequence
  Synthetic
gtagctgugaagacgttctguga

SEQ ID NO: 102904 - DNA, 23 bp, Artificial Sequence
  Synthetic
cctcgctgucataacaagauccc

SEQ ID NO: 102905 - DNA, 27 bp, Artificial Sequence
  Synthetic
ggagcaagagcacauagagattaauga

SEQ ID NO: 102906 - DNA, 20 bp, Artificial Sequence
  Synthetic
gacaagagacutcccgcugt

SEQ ID NO: 102907 - DNA, 27 bp, Artificial Sequence
  Synthetic
cctatgatuggcaaactcaagttctut

SEQ ID NO: 102908 - DNA, 28 bp, Artificial Sequence
  Synthetic
cactcattgacauctgctccttuagaaa

SEQ ID NO: 102909 - DNA, 22 bp, Artificial Sequence
  Synthetic
aaaugagcagggaggacatugt

SEQ ID NO: 102910 - DNA, 22 bp, Artificial Sequence
  Synthetic
accaugacgaagcagaagtucc

SEQ ID NO: 102911 - DNA, 28 bp, Artificial Sequence
  Synthetic
gcugattaaagctgtucaaaacgaagat

SEQ ID NO: 102912 - DNA, 22 bp, Artificial Sequence
  Synthetic
ctgttttgccaucactgtcugt

SEQ ID NO: 102913 - DNA, 21 bp, Artificial Sequence
  Synthetic
ggctatuacgcatctgcugct

SEQ ID NO: 102914 - DNA, 28 bp, Artificial Sequence
  Synthetic
cctccttctgaaguatcagcaatttugt

SEQ ID NO: 102915 - DNA, 24 bp, Artificial Sequence
  Synthetic
tcuctctcauggagccaaagaaga

SEQ ID NO: 102916 - DNA, 22 bp, Artificial Sequence
  Synthetic
gtctucagcaggagggugaaaa

SEQ ID NO: 102917 - DNA, 22 bp, Artificial Sequence
  Synthetic
aacgtggagccaguacagatug

SEQ ID NO: 102918 - DNA, 21 bp, Artificial Sequence
  Synthetic
caattgcuggaccaggucaac

SEQ ID NO: 102919 - DNA, 22 bp, Artificial Sequence
  Synthetic
agtggtagcagguggcattuac

SEQ ID NO: 102920 - DNA, 20 bp, Artificial Sequence
  Synthetic
ttgacaucagccccatgguc

SEQ ID NO: 102921 - DNA, 26 bp, Artificial Sequence
  Synthetic
gaaaaaggacacguagaggtctugaa

SEQ ID NO: 102922 - DNA, 27 bp, Artificial Sequence
  Synthetic
tttcaatgggtcauatcacagattcut

SEQ ID NO: 102923 - DNA, 21 bp, Artificial Sequence
  Synthetic
gtaagactgtugctgccagug

SEQ ID NO: 102924 - DNA, 23 bp, Artificial Sequence
  Synthetic
cttcgacaucgaggatgacauca

SEQ ID NO: 102925 - DNA, 21 bp, Artificial Sequence
  Synthetic
aagctguccttgtugcagaca

SEQ ID NO: 102926 - DNA, 28 bp, Artificial Sequence
  Synthetic
aagagagaaaucacagacauacaaagca

SEQ ID NO: 102927 - DNA, 28 bp, Artificial Sequence
  Synthetic
tttgatcatggucctatctctgtctuct

SEQ ID NO: 102928 - DNA, 23 bp, Artificial Sequence
  Synthetic
ctcacatugcccctgacaacaua

SEQ ID NO: 102929 - DNA, 28 bp, Artificial Sequence
  Synthetic
acagtaaataacacuctggtgtcatuct

SEQ ID NO: 102930 - DNA, 30 bp, Artificial Sequence
  Synthetic
aatgtaccatgtuaatgtcttcttgtucct

SEQ ID NO: 102931 - DNA, 24 bp, Artificial Sequence
  Synthetic
tggctgaccaguaaatccattcug

SEQ ID NO: 102932 - DNA, 33 bp, Artificial Sequence
  Synthetic
atctctgctattacuttactaagaatgatgaug

SEQ ID NO: 102933 - DNA, 21 bp, Artificial Sequence
  Synthetic
ccaacgcgagaaaucccugat

SEQ ID NO: 102934 - DNA, 32 bp, Artificial Sequence; identical to SEQ ID NO: 34208
  Synthetic

SEQ ID NO: 102935 - DNA, 28 bp, Artificial Sequence
  Synthetic
agctgacctagutccaatcttttcttut

SEQ ID NO: 102936 - DNA, 25 bp, Artificial Sequence
  Synthetic
tcataccttgcutaatgggtguaga

SEQ ID NO: 102937 - DNA, 25 bp, Artificial Sequence
  Synthetic
cctatcatcauaggtcgtcatgcut

SEQ ID NO: 102938 - DNA, 29 bp, Artificial Sequence
  Synthetic
aaattctgcattggugctaaaagtttcut

SEQ ID NO: 102939 - DNA, 24 bp, Artificial Sequence
  Synthetic
gcagagaaugagggaggaguacat

SEQ ID NO: 102940 - DNA, 27 bp, Artificial Sequence
  Synthetic
gtctagccagagacaucaagaatgaut

SEQ ID NO: 102941 - DNA, 27 bp, Artificial Sequence
  Synthetic
tgctaaaatgugtgatatcccuagaca

SEQ ID NO: 102942 - DNA, 31 bp, Artificial Sequence; identical to SEQ ID NO: 57612
  Synthetic

SEQ ID NO: 102943 - DNA, 22 bp, Artificial Sequence
  Synthetic
gcaaugagggaccagtacauga

SEQ ID NO: 102944 - DNA, 22 bp, Artificial Sequence
  Synthetic
ggagaaatutgccacttuggct

SEQ ID NO: 102945 - DNA, 27 bp, Artificial Sequence
  Synthetic
gcagcagacttugtggtcactaaaaug

SEQ ID NO: 102946 - DNA, 19 bp, Artificial Sequence
  Synthetic
cguggcaggaaacauccct

SEQ ID NO: 102947 - DNA, 26 bp, Artificial Sequence
  Synthetic
actgctcaaagaaacuaatcaacuga

SEQ ID NO: 102948 - DNA, 23 bp, Artificial Sequence
  Synthetic
aaaaactgtgutgtggagugcaa

SEQ ID NO: 102949 - DNA, 27 bp, Artificial Sequence
  Synthetic
cctgaacauccatttcaaaguaagcaa

SEQ ID NO: 102950 - DNA, 27 bp, Artificial Sequence
  Synthetic
tcttgattcuggaacagatttgtctut

SEQ ID NO: 102951 - DNA, 26 bp, Artificial Sequence
  Synthetic
gggattccaugattcgatgtucacat

SEQ ID NO: 102952 - DNA, 23 bp, Artificial Sequence
  Synthetic
cctatggcuttccaaccuaggaa

SEQ ID NO: 102953 - DNA, 17 bp, Artificial Sequence
  Synthetic
cagatccgugggcguga

SEQ ID NO: 102954 - DNA, 26 bp, Artificial Sequence
  Synthetic
gcattauaagccccagtgatctucca

SEQ ID NO: 102955 - DNA, 20 bp, Artificial Sequence
  Synthetic
tgcagctugcttagguccac

SEQ ID NO: 102956 - DNA, 21 bp, Artificial Sequence
  Synthetic
gctactggugatgctguccaa

SEQ ID NO: 102957 - DNA, 27 bp, Artificial Sequence
  Synthetic
ttgtattcaaggaguttgtttgtucct

SEQ ID NO: 102958 - DNA, 30 bp, Artificial Sequence
  Synthetic
ctgggaaaattaugcttactaatgtggtut

SEQ ID NO: 102959 - DNA, 24 bp, Artificial Sequence
  Synthetic
acaagcagautcaaggtgaucagt

SEQ ID NO: 102960 - DNA, 24 bp, Artificial Sequence
  Synthetic
ggaccaacugatcaccttgaauct

SEQ ID NO: 102961 - DNA, 28 bp, Artificial Sequence
  Synthetic
gcacttatgcutaaaatctattugcagt

SEQ ID NO: 102962 - DNA, 28 bp, Artificial Sequence
  Synthetic
tgtaggaaagguacaatgatttccacut

SEQ ID NO: 102963 - DNA, 27 bp, Artificial Sequence
  Synthetic
cacagatttataucatccaggcctuca

SEQ ID NO: 102964 - DNA, 26 bp, Artificial Sequence
  Synthetic
ggcctggaugatataaatctguggat

SEQ ID NO: 102965 - DNA, 32 bp, Artificial Sequence
  Synthetic
actaattaatcttcutacttcacacatuggct

SEQ ID NO: 102966 - DNA, 25 bp, Artificial Sequence
  Synthetic
tgcgaacagugaatatttccttuga

SEQ ID NO: 102967 - DNA, 27 bp, Artificial Sequence
  Synthetic
ggatctggatcauttggaacagtcuac

SEQ ID NO: 102968 - DNA, 30 bp, Artificial Sequence; identical to SEQ ID NO: 67354
  Synthetic

SEQ ID NO: 102969 - DNA, 24 bp, Artificial Sequence
  Synthetic
acctacttacugtacctggugaca

SEQ ID NO: 102970 - DNA, 25 bp, Artificial Sequence
  Synthetic
catacttaccaugccactttcccut

SEQ ID NO: 102971 - DNA, 26 bp, Artificial Sequence
  Synthetic
ttttctgtttggcutgacttgactut

SEQ ID NO: 102972 - DNA, 28 bp, Artificial Sequence
  Synthetic
gaagtgggtccuatagatttctcuacca

SEQ ID NO: 102973 - DNA, 23 bp, Artificial Sequence
  Synthetic
tcaccaatctuctaccagtgugt

SEQ ID NO: 102974 - DNA, 18 bp, Artificial Sequence
  Synthetic
ccagccuctcggguacat

SEQ ID NO: 102975 - DNA, 18 bp, Artificial Sequence
  Synthetic
ccacagcccccuguacga

SEQ ID NO: 102976 - DNA, 27 bp, Artificial Sequence
  Synthetic
tgagatcaagatugcagatacagaauc

SEQ ID NO: 102977 - DNA, 21 bp, Artificial Sequence
  Synthetic
ttcaccuttagcuggcagacc

SEQ ID NO: 102978 - DNA, 22 bp, Artificial Sequence
  Synthetic
agacagaaaagcggcugtuagt

SEQ ID NO: 102979 - DNA, 23 bp, Artificial Sequence
  Synthetic
ggtatccacaucctcttccucag

SEQ ID NO: 102980 - DNA, 33 bp, Artificial Sequence
  Synthetic
tgtatttttctttaagugcaaatagtgtatcug

SEQ ID NO: 102981 - DNA, 23 bp, Artificial Sequence
  Synthetic
cacctccugctaagcgaaatuct

SEQ ID NO: 102982 - DNA, 27 bp, Artificial Sequence
  Synthetic
ccatcttgaacauctttgtttctctuc

SEQ ID NO: 102983 - DNA, 28 bp, Artificial Sequence
  Synthetic
tgcatcactaacacuactatcaggguaa

SEQ ID NO: 102984 - DNA, 26 bp, Artificial Sequence
  Synthetic
gtgcattatugtgatgattcugacct

SEQ ID NO: 102985 - DNA, 24 bp, Artificial Sequence
  Synthetic
tctcctcaacaaccutccactgua

SEQ ID NO: 102986 - DNA, 26 bp, Artificial Sequence
  Synthetic
tccattttcttcuctctgaccttugg

SEQ ID NO: 102987 - DNA, 30 bp, Artificial Sequence
  Synthetic
atcatcgtcatucaagagaatatttuccct

SEQ ID NO: 102988 - DNA, 22 bp, Artificial Sequence
  Synthetic
gatggatacguggacccttcug

SEQ ID NO: 102989 - DNA, 29 bp, Artificial Sequence
  Synthetic
acatgggaaaacauaaccttgaauaaaag

SEQ ID NO: 102990 - DNA, 29 bp, Artificial Sequence
  Synthetic
attaaaaaccttgtuatataggcccagut

SEQ ID NO: 102991 - DNA, 21 bp, Artificial Sequence
  Synthetic
gcctgcccuagttccaagaug

SEQ ID NO: 102992 - DNA, 22 bp, Artificial Sequence
  Synthetic
gatttgggtgcutgggcctaua

SEQ ID NO: 102993 - DNA, 26 bp, Artificial Sequence
  Synthetic
agatgatgccutctccatttucagac

SEQ ID NO: 102994 - DNA, 19 bp, Artificial Sequence
  Synthetic
aggacugcccatccacuga

SEQ ID NO: 102995 - DNA, 28 bp, Artificial Sequence
  Synthetic
ccatcgcctcuttaacaatttagctaug

SEQ ID NO: 102996 - DNA, 33 bp, Artificial Sequence
  Synthetic
aatccgaattaguaatttatctaaatuggaggt

SEQ ID NO: 102997 - DNA, 27 bp, Artificial Sequence
  Synthetic
tcacggtgaacaaugtacttttgauga

SEQ ID NO: 102998 - DNA, 29 bp, Artificial Sequence
  Synthetic
aaatttuagagaagcaaaacatucaaggt

SEQ ID NO: 102999 - DNA, 23 bp, Artificial Sequence
  Synthetic
ctgtcagaugcccttcauggaaa

SEQ ID NO: 103000 - DNA, 26 bp, Artificial Sequence
  Synthetic
gcaaaacactucacggtactttcuac

SEQ ID NO: 103001 - DNA, 31 bp, Artificial Sequence
  Synthetic
atatcaaaggaatuatgtgtggattgtuaca

SEQ ID NO: 103002 - DNA, 28 bp, Artificial Sequence
  Synthetic
ttcttgttcctugcacattgatttctut

SEQ ID NO: 103003 - DNA, 33 bp, Artificial Sequence
  Synthetic
aaaaagttaaacaagugttttctgtattgtuga

SEQ ID NO: 103004 - DNA, 33 bp, Artificial Sequence
  Synthetic
atgttacatttctcuttagatgaacaaatguct

SEQ ID NO: 103005 - DNA, 28 bp, Artificial Sequence
  Synthetic
agttagtttgtgguagtagtcatgucat

SEQ ID NO: 103006 - DNA, 17 bp, Artificial Sequence
  Synthetic
ctgggcccutctgctug

SEQ ID NO: 103007 - DNA, 17 bp, Artificial Sequence
  Synthetic
cggctgcugtgcctuct

SEQ ID NO: 103008 - DNA, 27 bp, Artificial Sequence
  Synthetic
gctgactcggaguctcagtgataaaua

SEQ ID NO: 103009 - DNA, 23 bp, Artificial Sequence
  Synthetic
acattuaacgacaagcaaagcug

SEQ ID NO: 103010 - DNA, 27 bp, Artificial Sequence
  Synthetic
gcagaatgauttggacatugaagaaga

SEQ ID NO: 103011 - DNA, 25 bp, Artificial Sequence
  Synthetic
accgcaggcucaataaattatuact

SEQ ID NO: 103012 - DNA, 25 bp, Artificial Sequence
  Synthetic
ggcgaactucaggatcacagtaaut

SEQ ID NO: 103013 - DNA, 33 bp, Artificial Sequence
  Synthetic
aatgttgtatattaccautggctaaattttuga

SEQ ID NO: 103014 - DNA, 20 bp, Artificial Sequence
  Synthetic
ctcaggccgaugcttgaauc

SEQ ID NO: 103015 - DNA, 29 bp, Artificial Sequence
  Synthetic
actactagtaaccugatatacactgctut

SEQ ID NO: 103016 - DNA, 27 bp, Artificial Sequence
  Synthetic
gctcccactgutgatttatctgauagt

SEQ ID NO: 103017 - DNA, 33 bp, Artificial Sequence
  Synthetic
aaaaatatgtacgucaatattcacaugaagaaa

SEQ ID NO: 103018 - DNA, 22 bp, Artificial Sequence
  Synthetic
tcccggacucaaaatcctcuca

SEQ ID NO: 103019 - DNA, 28 bp, Artificial Sequence
  Synthetic
ccatgaataagcaugtcttcacatttut

SEQ ID NO: 103020 - DNA, 26 bp, Artificial Sequence
  Synthetic
ccttcacttugttttgagggauccaa

SEQ ID NO: 103021 - DNA, 31 bp, Artificial Sequence
  Synthetic
gtgctgtaagtatutcaaaagtacgtttuca

SEQ ID NO: 103022 - DNA, 33 bp, Artificial Sequence
  Synthetic
attgttttctctuagatatgcaataatttuccc

SEQ ID NO: 103023 - DNA, 28 bp, Artificial Sequence
  Synthetic
tccatcgattctuggtgttcttttacut

SEQ ID NO: 103024 - DNA, 28 bp, Artificial Sequence
  Synthetic
aattgtttccaaucatttagctucaccc

SEQ ID NO: 103025 - DNA, 28 bp, Artificial Sequence
  Synthetic
ggtgcttacaaucctgatgttttcatuc

SEQ ID NO: 103026 - DNA, 21 bp, Artificial Sequence
  Synthetic
ggaaacccaucgccugagaaa

SEQ ID NO: 103027 - DNA, 25 bp, Artificial Sequence
  Synthetic
gcaaagtgatugactgtgacagtuc

SEQ ID NO: 103028 - DNA, 23 bp, Artificial Sequence
  Synthetic
acaugttttcctcucgaaagcca

SEQ ID NO: 103029 - DNA, 26 bp, Artificial Sequence
  Synthetic
ggacaauggaaaggctgttataugga

SEQ ID NO: 103030 - DNA, 21 bp, Artificial Sequence
  Synthetic
tttcagggcugcaaccaagua

SEQ ID NO: 103031 - DNA, 21 bp, Artificial Sequence
  Synthetic
gggtcctgucaccgtaagaug

SEQ ID NO: 103032 - DNA, 21 bp, Artificial Sequence
  Synthetic
cttaggcaaggutgggtguga

SEQ ID NO: 103033 - DNA, 27 bp, Artificial Sequence
  Synthetic
catccaaagacuttttgccacttguag

SEQ ID NO: 103034 - DNA, 22 bp, Artificial Sequence
  Synthetic
gcaatattuggcaccactggut

SEQ ID NO: 103035 - DNA, 28 bp, Artificial Sequence
  Synthetic
tgtatcaactguggtaaatgctacauga

SEQ ID NO: 103036 - DNA, 21 bp, Artificial Sequence
  Synthetic
tctgaacagcutgccuaaccc

SEQ ID NO: 103037 - DNA, 28 bp, Artificial Sequence
  Synthetic
tcatgtagctcautgtcaagttggatut

SEQ ID NO: 103038 - DNA, 28 bp, Artificial Sequence
  Synthetic
ctactgtattattuctcatggcagcuct

SEQ ID NO: 103039 - DNA, 28 bp, Artificial Sequence
  Synthetic
gattgctagcautatgtgcagtuacaat

SEQ ID NO: 103040 - DNA, 23 bp, Artificial Sequence
  Synthetic
tgtttcaacautgagagcugggt

SEQ ID NO: 103041 - DNA, 27 bp, Artificial Sequence
  Synthetic
tgtataaguagagctgggttuggaact

SEQ ID NO: 103042 - DNA, 25 bp, Artificial Sequence
  Synthetic
cttggtgucaggcgaattaaagtut

SEQ ID NO: 103043 - DNA, 26 bp, Artificial Sequence
  Synthetic
ccaggaacctguacctttaatgtcug

SEQ ID NO: 103044 - DNA, 26 bp, Artificial Sequence
  Synthetic
ggctcacccugtagatcagagaauaa

SEQ ID NO: 103045 - DNA, 25 bp, Artificial Sequence
  Synthetic
accttctaccuctttcctgcttuag

SEQ ID NO: 103046 - DNA, 32 bp, Artificial Sequence; identical to SEQ ID NO: 55978
  Synthetic

SEQ ID NO: 103047 - DNA, 23 bp, Artificial Sequence
  Synthetic
cutccauaagaacggagggacat

SEQ ID NO: 103048 - DNA, 26 bp, Artificial Sequence
  Synthetic
atattctctguaagaatggcccuagt

SEQ ID NO: 103049 - DNA, 28 bp, Artificial Sequence
  Synthetic
acgggaaaagaacugtggttaaatauga

SEQ ID NO: 103050 - DNA, 20 bp, Artificial Sequence
  Synthetic
accacaucaccugcaaccat

SEQ ID NO: 103051 - DNA, 21 bp, Artificial Sequence
  Synthetic
ctggaagugcctcctcttcug

SEQ ID NO: 103052 - DNA, 23 bp, Artificial Sequence
  Synthetic
gctccacatcuccatggatacuc

SEQ ID NO: 103053 - DNA, 26 bp, Artificial Sequence
  Synthetic
gccttagtaaguccacacttuaagca

SEQ ID NO: 103054 - DNA, 26 bp, Artificial Sequence
  Synthetic
cgaacataugaacacgaagcaatgug

SEQ ID NO: 103055 - DNA, 28 bp, Artificial Sequence
  Synthetic
ccaacatactgaaauaacctcagcacua

SEQ ID NO: 103056 - DNA, 25 bp, Artificial Sequence
  Synthetic
ggctttgacaaacutgactttugga

SEQ ID NO: 103057 - DNA, 28 bp, Artificial Sequence
  Synthetic
gtgaagcacagguttttatcagtcatug

SEQ ID NO: 103058 - DNA, 22 bp, Artificial Sequence
  Synthetic
agctauccaggataugccacct

SEQ ID NO: 103059 - DNA, 23 bp, Artificial Sequence
  Synthetic
aacaccggacaagaguttcugaa

SEQ ID NO: 103060 - DNA, 18 bp, Artificial Sequence
  Synthetic
ggaggaccuggaccgugt

SEQ ID NO: 103061 - DNA, 17 bp, Artificial Sequence
  Synthetic
cgcacagccaccucugt

SEQ ID NO: 103062 - DNA, 28 bp, Artificial Sequence
  Synthetic
agtgaaaaacaatuccctgaaagcuaga

SEQ ID NO: 103063 - DNA, 21 bp, Artificial Sequence
  Synthetic
atctgaaagccgaugtgguca

SEQ ID NO: 103064 - DNA, 23 bp, Artificial Sequence
  Synthetic
atccatgcauctccttgccuaag

SEQ ID NO: 103065 - DNA, 28 bp, Artificial Sequence
  Synthetic
gcagatgcccuggagttaaatttaucat

SEQ ID NO: 103066 - DNA, 26 bp, Artificial Sequence
  Synthetic
ccggttaugcacatcatttaaguagg

SEQ ID NO: 103067 - DNA, 28 bp, Artificial Sequence
  Synthetic
tctatcaccaaguccaagtatguaacca

SEQ ID NO: 103068 - DNA, 20 bp, Artificial Sequence
  Synthetic
tggttccccggaugattcug

SEQ ID NO: 103069 - DNA, 28 bp, Artificial Sequence
  Synthetic
aaaattcctcugcaaaaatgugagaagg

SEQ ID NO: 103070 - DNA, 27 bp, Artificial Sequence
  Synthetic
ttctctctcuccaatagaaguggaaca

SEQ ID NO: 103071 - DNA, 27 bp, Artificial Sequence
  Synthetic
tgaagtugagcagcagaagtaguaaat

SEQ ID NO: 103072 - DNA, 17 bp, Artificial Sequence
  Synthetic
acgcggagcugcguaag

SEQ ID NO: 103073 - DNA, 18 bp, Artificial Sequence
  Synthetic
ccaccgaggcugaggaug

SEQ ID NO: 103074 - DNA, 27 bp, Artificial Sequence
  Synthetic
cgtaagtaaccucatgctttcugaagt

SEQ ID NO: 103075 - DNA, 24 bp, Artificial Sequence
  Synthetic
tcactgtgtugttgtacggaaugt

SEQ ID NO: 103076 - DNA, 17 bp, Artificial Sequence
  Synthetic
ccgcggutccctagcuc

SEQ ID NO: 103077 - DNA, 18 bp, Artificial Sequence
  Synthetic
acacacgguccacagcuc

SEQ ID NO: 103078 - DNA, 18 bp, Artificial Sequence
  Synthetic
gcagactugcggcagtut

SEQ ID NO: 103079 - DNA, 17 bp, Artificial Sequence
  Synthetic
agcucgaggcgtucagg

SEQ ID NO: 103080 - DNA, 22 bp, Artificial Sequence
  Synthetic
cttgggugggtagagcaaucag

SEQ ID NO: 103081 - DNA, 19 bp, Artificial Sequence
  Synthetic
gataccccgugggcaagut

SEQ ID NO: 103082 - DNA, 23 bp, Artificial Sequence
  Synthetic
ctgcttccaggugtcatatugga

SEQ ID NO: 103083 - DNA, 24 bp, Artificial Sequence
  Synthetic
gtggacatuagctcaagtcacuga

SEQ ID NO: 103084 - DNA, 22 bp, Artificial Sequence
  Synthetic
ccgaagcccuatttctctguct

SEQ ID NO: 103085 - DNA, 21 bp, Artificial Sequence
  Synthetic
tcgttgaggagugctgttucc

SEQ ID NO: 103086 - DNA, 21 bp, Artificial Sequence
  Synthetic
gggtagcacaguacgtcucca

SEQ ID NO: 103087 - DNA, 20 bp, Artificial Sequence
  Synthetic
gtgcuaacacggctctcuct

SEQ ID NO: 103088 - DNA, 20 bp, Artificial Sequence
  Synthetic
cgtccucaccggtcactcua

SEQ ID NO: 103089 - DNA, 20 bp, Artificial Sequence
  Synthetic
gtgctgcautgctgctuacc

SEQ ID NO: 103090 - DNA, 18 bp, Artificial Sequence
  Synthetic
cgcacaggguctcacugg

SEQ ID NO: 103091 - DNA, 17 bp, Artificial Sequence
  Synthetic
ccgcucacgccactuct

SEQ ID NO: 103092 - DNA, 27 bp, Artificial Sequence
  Synthetic
tgattgggtttuggcattttcaauaca

SEQ ID NO: 103093 - DNA, 28 bp, Artificial Sequence
  Synthetic
ggagactaaagucagacagtgaagatut

SEQ ID NO: 103094 - DNA, 21 bp, Artificial Sequence
  Synthetic
cgggaaacacagcucaaaucc

SEQ ID NO: 103095 - DNA, 21 bp, Artificial Sequence
  Synthetic
tcuatgcaaguccaacgcact

SEQ ID NO: 103096 - DNA, 22 bp, Artificial Sequence
  Synthetic
ggataatggtuaccccgtccuc

SEQ ID NO: 103097 - DNA, 27 bp, Artificial Sequence
  Synthetic
agtgctttctuacatcgttcaaacuct

SEQ ID NO: 103098 - DNA, 25 bp, Artificial Sequence
  Synthetic
agagataatgutgctgtcauggcaa

SEQ ID NO: 103099 - DNA, 28 bp, Artificial Sequence
  Synthetic
catctgttctttgutcactctcttcuat

SEQ ID NO: 103100 - DNA, 27 bp, Artificial Sequence
  Synthetic
tttcaatgggtcauatcacagattcut

SEQ ID NO: 103101 - DNA, 23 bp, Artificial Sequence
  Synthetic
ttcctcaggautgccttuaccac

SEQ ID NO: 103102 - DNA, 33 bp, Artificial Sequence; identical to SEQ ID NO: 496
  Synthetic

SEQ ID NO: 103103 - DNA, 27 bp, Artificial Sequence
  Synthetic
cacgctctauactgcaaatgctaucga

SEQ ID NO: 103104 - DNA, 28 bp, Artificial Sequence
  Synthetic
gaaguacccagattugacaaagaaaacc

SEQ ID NO: 103105 - DNA, 28 bp, Artificial Sequence
  Synthetic
cacaagtcagtguctttatccaaatguc

SEQ ID NO: 103106 - DNA, 28 bp, Artificial Sequence
  Synthetic
caatttttaatgaugctttctggcugga

SEQ ID NO: 103107 - DNA, 30 bp, Artificial Sequence; identical to SEQ ID NO: 461
  Synthetic

SEQ ID NO: 103108 - DNA, 32 bp, Artificial Sequence; identical to SEQ ID NO: 403
  Synthetic

SEQ ID NO: 103109 - DNA, 33 bp, Artificial Sequence; identical to SEQ ID NO: 404
  Synthetic

SEQ ID NO: 103110 - DNA, 33 bp, Artificial Sequence; identical to SEQ ID NO: 319
  Synthetic

SEQ ID NO: 103111 - DNA, 28 bp, Artificial Sequence
  Synthetic
gctgaagagugcaaacaatacatcauac

SEQ ID NO: 103112 - DNA, 22 bp, Artificial Sequence
  Synthetic
tgagtuccaaggcctcatucag

SEQ ID NO: 103113 - DNA, 28 bp, Artificial Sequence
  Synthetic
tgaaccatctttuaactcaggtactgug

SEQ ID NO: 103114 - DNA, 26 bp, Artificial Sequence
  Synthetic
gggaagaaaagugttttgaaatgugt

SEQ ID NO: 103115 - DNA, 27 bp, Artificial Sequence
  Synthetic
caaacaagttuatatttccccaugcca

SEQ ID NO: 103116 - DNA, 26 bp, Artificial Sequence
  Synthetic
tgggactttgguaattcaccagtuac

SEQ ID NO: 103117 - DNA, 28 bp, Artificial Sequence
  Synthetic
ctgcatcggguccacataaatatatuca

SEQ ID NO: 103118 - DNA, 25 bp, Artificial Sequence
  Synthetic
ctauttttccctttcuccccacaga

SEQ ID NO: 103119 - DNA, 23 bp, Artificial Sequence
  Synthetic
tgaccaaaacucagcctgttuct

SEQ ID NO: 103120 - DNA, 21 bp, Artificial Sequence
  Synthetic
ccagauagcccuggacaaacc

SEQ ID NO: 103121 - DNA, 24 bp, Artificial Sequence
  Synthetic
cagcatttacugcagcttgctuag

SEQ ID NO: 103122 - DNA, 24 bp, Artificial Sequence
  Synthetic
  misc_feature (1)..(24): any n is inosine
cctgcaantaatttnaagagttnt

SEQ ID NO: 103123 - DNA, 28 bp, Artificial Sequence
  Synthetic
  misc_feature (1)..(28): any n is inosine
tggcaacnacattcanttatttaattng

SEQ ID NO: 103124 - DNA, 20 bp, Artificial Sequence
  Synthetic
  misc_feature (1)..(20): any n is inosine
gaaggntgttgangcaacng

SEQ ID NO: 103125 - DNA, 21 bp, Artificial Sequence
  Synthetic
  misc_feature (1)..(21): any n is inosine
acaacnggcaaacngatgnca

SEQ ID NO: 103126 - DNA, 26 bp, Artificial Sequence
  Synthetic
  misc_feature (1)..(26): any n is inosine
gactgtancctgganattattcttnt

SEQ ID NO: 103127 - DNA, 25 bp, Artificial Sequence
  Synthetic
  misc_feature (1)..(25): any n is inosine
tctntcaanacaacacacaaacnct

SEQ ID NO: 103128 - DNA, 24 bp, Artificial Sequence
  Synthetic
  misc_feature (1)..(24): any n is inosine
atgatnctggagtnttcatgtgnt

SEQ ID NO: 103129 - DNA, 25 bp, Artificial Sequence
  Synthetic
  misc_feature (1)..(25): any n is inosine
tcttctntcactacngccagtaant

SEQ ID NO: 103130 - DNA, 25 bp, Artificial Sequence
  Synthetic
  misc_feature (1)..(25): any n is inosine
gcataanaataggnatagcttccng

SEQ ID NO: 103131 - DNA, 25 bp, Artificial Sequence
  Synthetic
  misc_feature (1)..(25): any n is inosine
tgatanacagcaacanctctcttng

SEQ ID NO: 103132 - DNA, 24 bp, Artificial Sequence
  Synthetic
  misc_feature (1)..(24): any n is inosine
acatcanctacagtncctcatgna

SEQ ID NO: 103133 - DNA, 15 bp, Artificial Sequence
  Synthetic
  misc_feature (1)..(15): any n is inosine
gcgnggtnccanccc

SEQ ID NO: 103134 - DNA, 22 bp, Artificial Sequence
  Synthetic
  misc_feature (1)..(22): any n is inosine
aaagaanggcagacngacagnt

SEQ ID NO: 103135 - DNA, 24 bp, Artificial Sequence
  Synthetic
  misc_feature (1)..(24): any n is inosine
tgactnattttnaccaagagtnca

SEQ ID NO: 103136 - DNA, 25 bp, Artificial Sequence
  Synthetic
  misc_feature (1)..(25): any n is inosine
tctgtttnatgtttncattcttgng

SEQ ID NO: 103137 - DNA, 20 bp, Artificial Sequence
  Synthetic
  misc_feature (1)..(20): any n is inosine
gaacantctggntggaatng

SEQ ID NO: 103138 - DNA, 21 bp, Artificial Sequence
  Synthetic
  misc_feature (1)..(21): any n is inosine
ttcaagngagtggnagcagna

SEQ ID NO: 103139 - DNA, 28 bp, Artificial Sequence
  Synthetic
  misc_feature (1)..(28): any n is inosine
ttttaaaaaanttctctcntatgcttnc

SEQ ID NO: 103140 - DNA, 21 bp, Artificial Sequence
  Synthetic
  misc_feature (1)..(21): any n is inosine
gcagncgttcacaangtncat

SEQ ID NO: 103141 - DNA, 20 bp, Artificial Sequence
  Synthetic
  misc_feature (1)..(30): any n is inosine
aacanccaaacaacagtgng

SEQ ID NO: 103142 - DNA, 24 bp, Artificial Sequence
  Synthetic
  misc_feature (1)..(24): any n is inosine
acaagaantagccanaagaacang

SEQ ID NO: 103143 - DNA, 26 bp, Artificial Sequence
  Synthetic
  misc_feature (1)..(26): any n is inosine
aaaagnataagttnccaactgttnat
